(19) United States
(12) Patent Application Publication
(10) Pub. No.: US 2002/0150877 A1
(43) Pub. Date: Oct. 17, 2002

(54) Cancer gene determination and therapeutic screening using signature gene sets

(76) Inventor: Meena Augustus, Burtonsville, MD (US)

Correspondence Address: CARELLA, BYRNE, BAIN, GILFILLAN,, CECCHI, STEWART & OLSTEIN, 6 Becker Farm Road, Roseland, NJ, 07068, US

(21) Appl. No.: 09/967,768

(22) Filed: Sep. 28, 2001

Related U.S. Application Data
(60) Provisional application No. 60/236,109, filed on Sep. 28, 2000.
(60) Provisional application No. 60/236,034, filed on Sep. 28, 2000.
(60) Provisional application No. 60/236,111, filed on Sep. 28, 2000.

(51) Int. Cl. C12Q 1/00; C12Q 1/68; G01N 33/574

(52) U.S. Cl. 435/4; 435/6; 435/7.23

(57) ABSTRACT

Processes for assaying potential antitumor agents based on their modulation of the expression of specified genes, or sets, of suspected cancer cell genes, especially for ovary cancer, are disclosed, along with methods for diagnosing cancerous, or potentially cancerous, conditions as a result of the expression, or patterns of expression, of such genes, or sets of genes. Also disclosed are methods for determining functionally related genes, or gene sets, as well as methods for treating cancer based on targeting expression products of such genes, or gene sets, and determining genes involved in the cancerous process.

[0001] This application claims priority of U.S. Provisional Application No. 60/236,109, filed Sep. 28, 2000, No. 60/236,034, filed Sep. 28, 2000 and No. 60/236,111, filed Sep. 28, 2000, the disclosures of which are hereby incorporated by reference in their entirety.

### FIELD OF THE INVENTION

[0002] The present invention relates to methods of assaying potential anti-tumor agents based on their modulation of the expression of specified sets of genes and methods for diagnosing cancerous, or potentially cancerous, conditions as a result of the patterns of expression of such genes.

### BACKGROUND OF THE INVENTION

[0003] Screening assays for novel drugs are based on the response of model cell based systems in vitro to treatment with specific compounds. Various measures of cellular response have been utilized, including the release of cytokines, alterations in cell surface markers, activation of specific enzymes, as well as alterations in ion flux and/or pH. Some such screens rely on specific genes, such as oncogenes (or gene mutations).

### BRIEF SUMMARY OF THE INVENTION

[0004] In accordance with the present invention, there are provided characteristic sets of gene sequences whose expression, or non-expression, or change in expression, either an increase or decrease thereof, are indicative of the cancerous or non-cancerous status of a given cell, especially ovary. More particularly, such genes whose expression is changed in cancerous, as compared to non-cancerous cells, from a specific tissue (in particular, ovary) are genes that include one of the nucleotide sequences of SEQ ID NO: 1-325, or sequences that are substantially identical to, or incorporated in, these sequences. Such a change in expression may be an increase or a decrease in expression or activity of the gene or gene sequences disclosed herein.

[0005] It is another object of the present invention to provide methods of using such characteristic, or signature, gene sets as a basis for assaying the potential ability of selected chemical agents to modulate upward or downward the expression of said characteristic, or signature, gene sets.

[0006] It is a further object of the present invention to provide methods of detecting the expression, or non-expression, or amount of expression, of said characteristic, or signature, gene sets, or portions thereof, as a means of determining the cancerous, or non-cancerous, status (or potential cancerous status) of selected cells as grown in culture or as maintained in situ.

[0007] It is a still further object of the present invention to provide methods for treating cancerous conditions utilizing selected chemical agents as determined from their ability to modulate (i.e., increase or decrease) the selected characteristic, or signature, gene sets as disclosed herein, where said genes include, or comprise, one of the sequences of SEQ ID NO: 1-325, or sequences substantially identical to said sequences, or characteristic portions of said sequences.

[0008] In one aspect, the present invention relates to a process for identifying an agent that modulates the activity of a cancer-related gene comprising:

[0009] (a) contacting a compound with a cell containing a gene corresponding to (such as a gene that encodes an RNA at least 90% identical to the RNA encoded by or complementary to) a polynucleotide having a sequence selected from the group consisting of SEQ ID NO: 1-325 and under conditions promoting the expression of said gene; and

[0010] (b) detecting a difference in expression of said gene relative to when said compound is not present

[0011] thereby identifying an agent that modulates the activity of a cancer-related gene. Such a process is especially useful for agents effective against cancer of the ovary.

[0012] The present invention also relates to a process for identifying an anti-neoplastic agent comprising contacting a cell exhibiting neoplastic activity with a compound first identified as a cancer-related gene modulator using an assay process as disclosed herein for determining gene modulating activity and detecting a decrease in said neoplastic activity after said contacting compared to when said contacting does not occur.

[0013] In a further aspect, the present invention relates to a process for identifying an anti-neoplastic or anti-tumor agent comprising administering to an animal exhibiting a cancerous condition an effective amount of an agent first identified according to a process as disclosed herein and detecting a decrease in said cancerous condition thereby identifying such an agent, said decrease including the death of the cancerous cell or cells.

[0014] The present invention also relates to a process for determining the cancerous status of a cell, comprising determining the level of expression in said cell of at least one gene that corresponds to a polynucleotide having a sequence selected from the group consisting of SEQ ID NO: 1-325 wherein an elevated expression relative to a known non-cancerous cell when the sequence is one of SEQ ID NO: 1-226 and 280-325 or a reduced expression relative to a known non-cancerous cell when the sequence is one of SEQ ID NO: 227-279 indicates a cancerous state or potentially cancerous state. Such sequence identity may include 100 percent identical as defined herein and any number of such genes may be used.

[0015] In an additional aspect, the present invention relates to a process for determining a cancer initiating or facilitating gene comprising contacting a cell expressing a test gene (i.e., a gene whose status as a cancer initiating or facilitating gene is to be determined) with an agent that decreases the expression of a gene that encodes an RNA at least 95% identical to an RNA encoded by (i.e., a gene corresponding to) a polynucleotide having a sequence selected from the group consisting of SEQ ID NO: 1-226 and 280-325 and detecting a decrease in expression of said test gene compared to when said agent is not present, thereby identifying said test gene as being a cancer initiating or facilitating gene. Such genes may, of course, be oncogenes and said decrease in expression may be due to a decrease in copy number of said gene in said cell or a cell derived from said cell, such as where copy number is reduced in the cells formed by replication of such cells.

[0016] The present invention also relates to a process for determining a cancer suppressor gene comprising contacting a cell expressing a test gene (i.e., a gene whose status as a cancer suppressor gene is to be determined) with an agent that increases the expression of a gene that corresponds to (i.e., encodes an RNA at least 95% identical to an RNA encoded by or complementary to) a polynucleotide having a sequence selected from the group consisting of SEQ ID NO: 227-279 and detecting an increase in expression of said test gene compared to when said agent is not present, thereby identifying said test gene as being a cancer suppressor gene. The sequence identity may include identical sequences, as defined herein, and such a process includes embodiments wherein the increase in expression is due to an increase in copy number of the gene in said cell or a cell derived from said cell, such as following cellular replication.

[0017] In another aspect, the present invention relates to a process for treating cancer comprising contacting a cancerous cell with an agent having activity against an expression product encoded by a gene corresponding to a polynucleotide having a nucleotide sequence selected from at least one of SEQ ID NO: 1-226 and 280-325. Such a process includes an embodiment wherein the cancerous cell is contacted in vivo. The agent may include an antibody. In a preferred embodiment, the cancer is cancer of the ovary, especially a carcinoma, most preferably malignant ovarian carcinoma. In another preferred embodiment, the cancer is metastatic ovarian cancer.

[0018] The present invention also relates to a method for producing a product comprising identifying an agent according to the assay processes of the invention wherein said product is the data collected with respect to said agent as a result of said process and wherein said data is sufficient to convey the chemical structure and/or properties of said agent.

[0019] The present invention further relates to a process for treating a cancerous condition in an animal afflicted therewith comprising administering to said animal a therapeutically effective amount of an agent first identified as having anti-neoplastic activity using one or more of the processes of the invention.

[0020] In a further aspect, the present invention relates to a process for protecting an animal against cancer comprising administering to an animal at risk of developing cancer a therapeutically effective amount of an agent first identified as having anti-neoplastic activity using one or more of the processes disclosed herein.

### DETAILED SUMMARY OF THE INVENTION

[0021] The present invention relates to methods of assaying for potential antitumor agents based on their modulation of the expression of specified sets of genes and methods for diagnosing cancerous, or potentially cancerous, conditions, especially of ovary, as a result of the patterns of expression of such gene sets and for determining cancer-inducing or regulating genes, and gene sets, based on common expression or regulation of such genes, or gene sets.

[0022] In accordance with the present invention, model cellular systems using cell lines, primary cells, or tissue samples are maintained in growth medium and may be treated with compounds that may be at a single concentration or at a range of concentrations. At specific times after treatment, cellular RNAs are isolated from the treated cells, primary cells or tumors, which RNAs are indicative of expression of selected genes. The cellular RNA is then divided and subjected to analysis that detects the presence and/or quantity of specific RNA transcripts, which transcripts may then be amplified for detection purposes using standard methodologies, such as, for example, reverse transcriptase polymerase chain reaction (RT-PCR), etc. The presence or absence, or levels, of specific RNA transcripts are determined from these measurements and a metric derived for the type and degree of response of the sample to the treated compound compared to control samples.

[0023] Also in accordance with the present invention, there are disclosed herein characteristic, or signature, sets of genes and gene sequences whose expression is, or can be, as a result of the methods of the present invention, linked to, or used to characterize, the cancerous, or non-cancerous, status of the cells, or tissues, to be tested, especially tissues derived from ovary (i.e., cancer-related genes and gene sequences). Thus, the methods of the present invention identify novel anti-neoplastic agents based on their alteration of expression of small sets of characteristic, or indicator, or signature genes in specific model systems. The methods of the invention may therefore be used with a variety of cell lines or with primary samples from tumors maintained in vitro under suitable culture conditions for varying periods of time, or in situ in suitable animal models.

[0024] More particularly, certain genes have been identified that are expressed at levels in cancer cells that are different than the expression levels in non-cancer cells. In one instance, the identified genes are expressed at higher levels in cancer cells than in normal cells. In another instance, the identified genes are expressed at lower levels in cancer cells as compared to normal cells.

[0025] In accordance with the foregoing, the present invention relates to a process for determining the cancerous status of a cell, comprising determining the level of expression in said cell of at least one gene that corresponds to (i.e., encodes an RNA at least 95% identical to the RNA encoded by or complementary to) a polynucleotide having a sequence selected from the group consisting of SEQ ID NO: 1-325 wherein an elevated expression relative to a known non-cancerous cell when the sequence is one of SEQ ID NO: 1-226 and 280-325, or a reduced expression relative to a known non-cancerous cell when the sequence is one of SEQ ID NO: 227-279, indicates a cancerous state or potentially cancerous state. Such sequence identity may include 100 percent identical as defined herein and any number of such genes may be used.

[0026] Thus, the present invention also relates to a process for identifying an anti-neoplastic agent comprising contacting a cell exhibiting neoplastic activity with a compound first identified as a cancer-related gene modulator using an assay process as disclosed herein for determining gene modulating activity and detecting a decrease in said neoplastic activity after said contacting compared to when said contacting does not occur (i.e., comparing expression when said agent is present versus when said agent is not present).

[0027] In preferred embodiments of the present invention, such cancer is ovary cancer, such as metastatic ovarian cancer or a carcinoma, preferably ovary carcinoma, most preferably malignant ovarian carcinoma.

[0028] In a further aspect, the present invention relates to a process for identifying an anti-neoplastic agent comprising administering to an animal exhibiting a cancerous condition an effective amount of an agent first identified as having such activity using a process as disclosed herein and detecting a decrease in said cancerous condition thereby identifying such an agent.

[0029] It should be kept in mind that the anti-tumor or anti-neoplastic agents identified by the processes of the invention include both novel agents whose structure and anti-tumor activity were not previously known prior to identification of their activity by the processes herein as well as non-novel agents, whose structure was known but whose therapeutic value as anti-tumor agents was not appreciated prior to identification by the assay processes of the invention.

[0030] In accordance with the foregoing, the present invention relates to a process for screening for an anti-neoplastic agent comprising the steps of:

[0031] (a) contacting a compound with a cell containing a polynucleotide comprising a nucleotide sequence selected from the group consisting of SEQ ID NO: 1-325, or a sequence at least 95% identical thereto, under conditions wherein said polynucleotide is being expressed, and

[0032] (b) determining a change in expression of at least one of said polynucleotides,

[0033] wherein a change in expression is indicative of anti-neoplastic activity.

[0034] In particular embodiments, such change in expression may be an increase or a decrease in expression or activity. Of course, decreased expression of cancer initiating or facilitating genes is highly desirable, as is an increased expression of cancer suppressor genes.

[0035] More particularly, the present invention relates to a process for screening for an anti-neoplastic agent comprising the steps of:

[0036] (a) exposing a known cancerous cell to a chemical agent to be tested for antineoplastic activity;

[0037] (b) allowing said chemical agent to modulate the activity of one or more genes present in said cell wherein said genes include or comprise one of the sequences selected from the group consisting of the sequences of SEQ ID NO: 1-325, sequences substantially identical to said sequences, or the complements of any of the foregoing;

[0038] (c) determining the expression of one or more genes of step (b);

[0039] (d) comparing the expression of said genes in the presence or absence of exposure to said chemical agent;

[0040] wherein a difference in expression is indicative of the ability of anti-neoplastic activity.

[0041] Thus, in one aspect, the present invention relates to a process for identifying an agent that modulates the activity of a cancer-related gene, especially for cancer of the ovary, comprising:

[0042] (a) contacting a compound with a cell containing a gene that encodes an RNA at least 90 or 95% identical to the RNA encoded by (i.e., a gene that corresponds to) a polynucleotide having a sequence selected from the group consisting of SEQ ID NO: 1-325 and under conditions promoting the expression of said gene; and

[0043] (b) detecting a difference in expression of said gene relative to when said compound is not present

[0044] thereby identifying an agent that modulates the activity of a cancer-related gene.

[0045] Such sequence identity includes embodiments wherein the RNAs are at least 97 or 98% identical in sequence and include cases where the sequence is the same, thus where a gene encodes an RNA with the same nucleotide sequence as an RNA encoded by one of the sequences of SEQ ID NO: 1-325.

[0046] In one embodiment of such processes, the sequence is selected from SEQ ID NO: 1-226 and 280-325, and said difference in expression is a decrease in expression. Here, the gene used encodes an RNA like that encoded by (or at least 90% identical to) one of the sequences found to be expressed at an elevated level in cancer cells, especially ovary cancer cells. In another such embodiment, the sequence is selected from SEQ ID NO: 227-279 and said difference in expression is an increase in expression. The latter sequences encode RNAs found to be expressed at higher levels in normal cells, such as ovary cells, as opposed to cancer cells.

[0047] In specific embodiments of the present invention, said chemical agent to be tested modulates the expression of more than one said gene, especially where it modulates at least two said genes, more especially where at least 3, or at least 5 of said genes, or even 10 or more of said genes in said signature set, are modulated. In a preferred embodiment, this may include more than 10 (such as 20, 50 or even 100) or even all of said genes are modulated.

[0048] In one embodiment of the present invention, said gene modulation is downward modulation, so that, as a result of exposure to the chemical agent to be tested, one or more genes of the cancerous cell will be expressed at a lower level (or not expressed at all) when exposed to (i.e., contacted with) the agent as compared to the expression when not exposed to the agent (i.e., when said agent is not present).

[0049] In a preferred embodiment a selected set of said genes are expressed in the reference cell but not expressed in the cell to be tested as a result of the contacting or exposure of the test cell with the chemical agent. Thus, where said chemical agent causes the gene, or genes, of the tested cell to be expressed at a lower level than the same genes of the reference cell, this is indicative of downward modulation and indicates that the chemical agent to be tested has anti-neoplastic activity (or activity in reducing expression of such cancer-related genes).

[0050] In a separate embodiment, exposure of said cells to be tested to the chemical agent, especially one suspected of having anti-neoplastic activity, may result in upward modulation of said genes of the cell to be tested. Such upward modulation is interpreted as meaning that said genes are expressed where previously not expressed, or else are expressed in greater quantities, or at higher levels, when exposed to the agent as compared to non-exposure to the agent. Such upward modulation may be taken as indicative of anti-neoplastic activity by the tested chemical agent(s) of the gene, or genes, so modulated, resulting in lower neoplastic activity on the part of such cells, such as where increased expression of the gene, or genes, results in decreased growth and/or increased differentiation of said cells away from the cancerous state.

[0051] The genes useful in the assay processes include, respectively, as a part thereof at least one of the sequences selected from the group consisting of the sequences of SEQ ID NO: 1-325, or sequences substantially identical thereto. Such sequences also include sequences complementary to any of the sequences disclosed herein.

[0052] The genes identified by the present disclosure are considered “cancer-related” genes, as this term is used herein, and includes genes expressed at higher levels (due, for example, to elevated rates of expression, elevated extent of expression or increased copy number) in cancer cells relative to expression of these genes in normal (i.e., non-cancerous) cells where said cancerous state or status of test cells or tissues has been determined by methods known in the art, such as by reverse transcriptase polymerase chain reaction (RT-PCR) as described in the Example below. In specific embodiments, this relates to the genes whose sequences correspond to the sequences of SEQ ID NO: 1-226 and 280-325. Also specifically contemplated are genes whose expression is higher in normal as opposed to known cancer cells (as determined by other means, such as uncontrolled growth, change in antigenic surface proteins, genetic mutation, and the like) such that the decreased expression in cancer cells may be indicative of, or contributory to, the realization of the cancerous state. In specific embodiments thereof, this relates to the genes whose sequences correspond to the sequences of SEQ ID NO: 227-279 disclosed herein. As used herein, the term “correspond” means that the gene has the indicated nucleotide sequence or that it encodes substantially the same RNA as would be encoded by the indicated sequence, the term “substantially” meaning about at least 90% identical as defined elsewhere herein and includes splice variants thereof.

[0053] The sequences disclosed herein may be genomic in nature and thus represent the sequence of an actual gene, such as a human gene, or may be a cDNA sequence derived from a messenger RNA (mRNA) and thus represent contiguous exonic sequences derived from a corresponding genomic sequence or they may be wholly synthetic in origin for purposes of tecting. As described in the Example, the expression of these cancer-related genes is determined from the relative expression levels of the RNA complement of a cancerous cell relative to a normal (i.e., non-cancerous) cell. Because of the processing that may take place in transforming the initial RNA transcript into the final mRNA, the sequences disclosed herein may represent less than the full genomic sequence. They may also represent sequences derived from ribosomal and transfer RNAs. Consequently, the genes present in the cell (and representing the genomic sequences) and the sequences disclosed herein, which are mostly cDNA sequences, may be identical or may be such that the cDNAs contain less than the full genomic sequence. Such genes and cDNA sequences are still considered corresponding sequences because they both encode similar RNA sequences. Thus, by way of non-limiting example only, a gene that encodes an RNA transcript, which is then processed into a shorter mRNA, is deemed to encode both such RNAs and therefore encodes an RNA complementary to (using the usual Watson-Crick complementarity rules), or that would otherwise be encoded by, a cDNA (for example, a sequence as disclosed herein). Thus, the sequences disclosed herein correspond to genes contained in the cancerous or normal cells used to determine relative levels of expression because they represent the same sequences or are complementary to RNAs encoded by these genes. Such genes also include different alleles and splice variants that may occur in the cells used in the processes of the invention.

[0054] The genes of the invention “correspond to” a polynucleotide having a sequence of SEQ ID NO: 1-325 if the gene encodes an RNA (processed or unprocessed, including naturally occurring splice variants and alleles) that is at least 90% identical, preferably at least 95% identical, most preferably at least 98% identical to, and especially identical to, an RNA that would be encoded by, or be complementary to, such as by hybridization with, a polynucleotide having the indicated sequence. In addition, genes including sequences at least 90% identical to a sequence selected from SEQ ID NO: 1-325, preferably at least about 95% identical to such a sequence, more preferably at least about 98% identical to such sequence and most preferably comprising such sequence are specifically contemplated by all of the processes of the present invention as being genes that correspond to these sequences. In addition, sequences encoding the same proteins as any of these sequences, regardless of the percent identity of such sequences, are also specifically contemplated by any of the methods of the present invention that rely on any or all of said sequences, regardless of how they are otherwise described or limited. Thus, any such sequences are available for use in carrying out any of the methods disclosed according to the invention. Such sequences also include any open reading frames, as defined herein, present within any of the sequences of SEQ ID NO: 1-325.

[0055] Further in accordance with the present invention, the term “percent identity” or “percent identical,” when referring to a sequence, means that a sequence is compared to a claimed or described sequence after alignment of the sequence to be compared (the “Compared Sequence”) with the described or claimed sequence (the “Reference Sequence”). The Percent Identity is then determined according to the following formula:

Percent Identity=100 [1−(C/R)]

[0056] wherein C is the number of differences between the Reference Sequence and the Compared Sequence over the length of alignment between the Reference Sequence and the Compared Sequence wherein (i) each base or amino acid in the Reference Sequence that does not have a corresponding aligned base or amino acid in the Compared Sequence and (ii) each gap in the Reference Sequence and (iii) each aligned base or amino acid in the Reference Sequence that is different from an aligned base or amino acid in the Compared Sequence, constitutes a difference; and R is the number of bases or amino acids in the Reference Sequence over the length of the alignment with the Compared Sequence with any gap created in the Reference Sequence also being counted as a base or amino acid.

[0057] If an alignment exists between the Compared Sequence and the Reference Sequence for which the percent identity as calculated above is about equal to or greater than a specified minimum Percent Identity then the Compared Sequence has the specified minimum percent identity to the Reference Sequence even though alignments may exist in which the hereinabove calculated Percent Identity is less than the specified Percent Identity.

[0058] As used herein, the terms “portion,” “segment,” and “fragment,” when used in relation to polypeptides, refer to a continuous sequence of nucleotide residues, sequence forms a subset of a larger sequence. Such terms include the products produced by treatment of said polynucleotides with any of the common endonucleases, or any stretch of polynucleotides that could be synthetically synthesized. These may include exonic and intronic sequences of the corresponding genes.

[0059] As used herein and except as noted otherwise, all terms are defined as given below.

[0060] In accordance with the present invention, the term “DNA segment” or “DNA sequence” refers to a DNA polymer, in the form of a separate fragment or as a component of a larger DNA construct, which has been derived from DNA isolated at least once in substantially pure form, i.e., free of contaminating endogenous materials and in a quantity or concentration enabling identification, manipulation, and recovery of the segment and its component nucleotide sequences by standard biochemical methods, for example, using a cloning vector. Such segments are provided in the form of an open reading frame uninterrupted by internal nontranslated sequences, or introns, which are typically present in eukaryotic genes. Sequences of non-translated DNA may be present downstream from the open reading frame, where the same do not interfere with manipulation or expression of the coding regions.

[0061] The term “coding region” refers to that portion of a gene which either naturally or normally codes for the expression product of that gene in its natural genomic environment, i.e., the region coding in vivo for the native expression product of the gene. The coding region can be from a normal, mutated or altered gene, or can even be from a DNA sequence, or gene, wholly synthesized in the laboratory using methods well known to those of skill in the art of DNA synthesis.

[0062] In accordance with the present invention, the term “nucleotide sequence” refers to a heteropolymer of deoxyribonucleotides. Generally, DNA segments encoding the proteins provided by this invention are assembled from cDNA fragments and short oligonucleotide linkers, or from a series of oligonucleotides, to provide a synthetic gene which is capable of being expressed in a recombinant transcriptional unit comprising regulatory elements derived from a microbial or viral operon.

[0063] The term “expression product” means that polypeptide or protein that is the natural translation product of the gene and any nucleic acid sequences coding equivalents resulting from genetic code degeneracy and thus coding for the same amino acid(s).

[0064] The term “fragment,” when referring to a coding sequence, means a portion of DNA comprising less than the complete coding region whose expression product retains essentially the same biological function or activity as the expression product of the complete coding region.

[0065] The term “primer” means a short nucleic acid sequence that is paired with one strand of DNA and provides a free 3′-OH end at which a DNA polymerase starts synthesis of a deoxyribonucleotide chain. These include PCR primers.

[0066] The term “promoter” means a region of DNA involved in binding of RNA polymerase to initiate transcription. The term “enhancer” refers to a region of DNA that, when present and active, has the effect of increasing expression of a different DNA sequence that is being expressed, thereby increasing the amount of expression product formed from said different DNA sequence.

[0067] The term “open reading frame (ORF)” means a series of triplets coding for amino acids without any termination codons and is a sequence (potentially) translatable into protein.

[0068] As used herein, reference to a DNA sequence includes both single stranded and double stranded DNA. Thus, the specific sequence, unless the context indicates otherwise, refers to the single strand DNA of such sequence, the duplex of such sequence with its complement (double stranded DNA) and the complement of such sequence.

[0069] In carrying out the assays of the invention, relative antineoplastic activity may be ascertained by the extent to which a given chemical agent modulates the expression of genes present in a cancerous cell. Thus, a first chemical agent that modulates the expression of a gene associated with the cancerous state (i.e., a gene that includes one of the sequences disclosed herein and present in cancerous cells) to a larger degree than a second chemical agent tested by the assays of the invention is thereby deemed to have higher, or more desirable, or more advantageous, anti-neoplastic activity than said second chemical agent. Alternatively, where first and second chemical agents modulate expression of more than one of said genes, but where the second modulates expression of, for example, five said genes, whereas the first modulates expression of only three of said genes, especially where the three form a subset of the five, then the second chemical agent is deemed a more potent anti-neoplastic agent than the first. Such anti-neoplastic activity, as determined using the assays of the present invention, may necessarily include combinations of the foregoing possibilities, which are in no way to be considered limiting.

[0070] In utilizing these gene sequences for the assays according to the invention, the genes whose activity is to be determined with and without the presence of the compound to be evaluated for antitumor activity may be any one, or several, or any combination of the gene sequences disclosed herein as SEQ ID NO: 1-325. However, how the gene sequences are employed in such assays depends on the pattern of gene expression disclosed for the signature sets. For example, a sequence that is expressed in cancerous cells but not in normal cells will identify a potential anticancer agent by that agents ability to decrease expression of the sequence, or sequences, in tumor cells. Conversely, a sequence, or sequences, expressed in normal but not tumor cells will identify a potential antitumor agent by its ability to increase expression of those genes in the tumor cells. The same relationship holds true where the sequences are expressed in both cancer and normal cells but are expressed at a higher level in one than in the other, and vice versa. Based on the expression patterns disclosed for the gene sequences and signature sets disclosed herein, it should be readily apparent to those skilled in the art how to conduct assays for potential antitumor agents using the signature gene sets. The same holds true where the sequences, or signature gene sets, are utilized to determine the cancerous state of a cell or use of an agent to treat a cancerous condition.

[0071] Thus, in one aspect, the present invention relates to a process for screening for an anti-neoplastic agent comprising the steps of (a) exposing cells to a chemical agent to be tested for antineoplastic activity, and (b) determining a change in expression of at least one gene of a signature gene set, or a sequence that is at least 90%, preferably at least 95% identical thereto, wherein a change in expression is indicative of anti-neoplastic activity. Such change in expression is intended to mean a change that includes any activity of the gene, and may be an increase or decrease thereof. In addition, such change in activity may be a change in expression or other activity of at least 1 such gene, such as 5 or 10, or more of the genes of a signature set, even as many as half of such genes or even of all of the genes of a particular gene set.

[0072] The gene expression to be measured is commonly assayed using RNA expression as an indicator. Thus, the greater the level of RNA (such as a messenger RNA) detected the higher the level of expression of the corresponding gene. Thus, gene expression, either absolute or relative, such as where the expression of several different genes are being quantitatively evaluated and compared, for example, where chemical agents modulate the expression of more than one gene, such as a set of 3, 4, 5, or more genes, is determined by the relative expression of the RNAs encoded by such genes.

[0073] RNA may be isolated from samples in a variety of ways, including lysis and denaturation with a phenolic solution containing a chaotropic agent (e.g., triazol) followed by isopropanol precipitation, ethanol wash, and resuspension in aqueous solution; or lysis and denaturation followed by isolation on solid support, such as a Qiagen resin and reconstitution in aqueous solution; or lysis and denaturation in non-phenolic, aqueous solutions followed by enzymatic conversion of RNA to DNA template copies.

[0074] Normally, prior to applying the processes of the invention, steady state RNA expression levels for the genes, and sets of genes, disclosed herein will have been obtained. It is the steady state level of such expression that is affected by potential anti-neoplastic agents as determined herein. Such steady state levels of expression are easily determined by any methods that are sensitive, specific and accurate. Such methods include, but are in no way limited to, real time quantitative polymerase chain reaction (PCR), for example, using a Perkin-Elmer 7700 sequence detection system with gene specific primer probe combinations as designed using any of several commercially available software packages, such as Primer Express software, solid support based hybridization array technology using appropriate internal controls for quantitation, including filter, bead, or microchip based arrays, solid support based hybridization arrays using, for example, chemiluminescent, fluorescent, or electrochemical reaction based detection systems.

[0075] In one embodiment of the present invention, a set of genes useful in evaluating, or screening, or otherwise assaying, one or more chemical agents for anti-neoplastic activity in the assays disclosed herein will have already been shown to have differences in the ratios of steady state RNA levels in cancer cells, or tissues, relative to normal, or non-tumorous cells or tissues, or will have exhibited differences in the expression ratios in tumor samples compared to normal samples between genes in a given subset of the set of genes disclosed herein, or will have gene expression that has increased from undetectable levels to detectable levels, or vice versa, as the case may be, especially where sensitive detection methods are employed, or conversely will have decreased from detectable levels to undetectable levels with such procedures, especially sensitive procedures.

[0076] The genes, and gene sequences, useful in practicing the methods of the present invention are genes that are found to be selectively expressed in, or not expressed in, cancer cells as compared to non-cancer cells, or in which expression is down-regulated or up-regulated, as the case may be, in cancerous cells as compared to non-cancerous cells. Thus, these may include genes, or sets of genes, expressed in cancer cells but absent from, or inactive in, non-cancerous cells, or may include genes, or sets of genes, expressed in non-cancerous cells, but not expressed in cancer cells. Alternatively, the genes useful in practicing the present invention may be more expressed, or less expressed, in a cancerous cell relative to a non-cancerous cell. Such genes are generally those comprising the sequences of SEQ ID NO: 1-325, with SEQ ID NO: 1-226 and 280-325 exhibiting elevated expression in cancer cells related to normal cells and vice versa for SEQ ID NO: 227-279.

[0077] In accordance with the foregoing, the present invention further relates to a process for determining the cancerous status of a test cell, comprising determining expression in said test cell of at least one gene that corresponds to, or includes, one of the nucleotide sequences selected from the sequences of SEQ ID NO: 1-325, or a nucleotide sequence that is at least 90%, preferably at least 95%, identical thereto, and then comparing said expression to expression of said at least one gene in at least one cell known to be non-cancerous whereby a difference in said expression indicates that said cell is cancerous.

[0078] In a particular embodiment, the present invention is directed to a process for determining the cancerous status of a cell to be tested, comprising determining the presence in said cell of at least one gene that includes one of the nucleotide sequences selected from the sequences of SEQ ID NO: 1-325, including sequences having substantial identity homologous to said sequences, or characteristic fragments thereof, or the complements of any of the foregoing and then comparing the pattern of said gene presence and/or absence with that found for a cell known, or believed, to be non-cancerous, or normal, at least with respect to its genetic complement.

[0079] With respect to genes that correspond to at least one of the sequences of SEQ ID NO: 1-226 and 280-325, up regulation of expression in cancer cells (as compared to non-cancer cells, which may lack said genes, or said gene expression, altogether) is indicative of a cancerous, or potentially cancerous, condition.

[0080] In specific embodiments, the present invention relates to embodiments wherein the genetic pattern is the modulation of expression of more than one gene, preferably 3, 4, or 5 genes, and even includes patterns where there is a modulation of expression of as many as 10, or more, genes. Thus, where a genetic pattern is the modulation of expression of 5 genes in a cancerous cell as compared to a non-cancerous cell from the same tissue type, such as a cancerous ovary cell, versus a non-cancerous cell of ovary, such a pattern indicates a likelihood that such genes (i.e., the modulation of expression of those genes) is an indicator of cancerous status and thereby provides a means of diagnosing a cancerous, or potentially cancerous, status. The absence of a specific set of genes from cancerous cells where said genes are present in otherwise normal cells, especially those of a similar type, is also indicative of a correlation with the cancerous state and thus can likewise be used as a means of diagnosing the cancerous state in other cells suspected of being cancerous.

[0081] In a particular embodiment, the gene sequences as disclosed herein are indicative of the cancerous or normal state of ovary tissues. This includes SEQ ID NO: 1-325 for ovary, wherein SEQ ID NO: 1-226 represent genes or gene sequences expressed in malignant ovarian carcinoma that are not found in normal ovary tissue, wherein SEQ ID NO: 227-279 represent genes or gene sequences expressed in normal ovary cells that are not expressed at detectable levels in ovary cancer and wherein SEQ ID NO: 280-325 represent genes or gene sequences expressed in metastatic ovarian cancer but not in normal ovary cells.

[0082] The gene patterns indicative of a cancerous state need not be characteristic of every cell found to be cancerous. Thus, the methods disclosed herein are useful for detecting the presence of a cancerous condition within a tissue where less than all cells exhibit the complete pattern. For example, a set of selected genes, comprising sequences homologous under stringent conditions (i.e., at least 95% identical) to at least one of the sequences of SEQ ID NO: 1-226 and 280-325, and wherein the signature set is comprised of genes expressed and/or up-regulated in cancer cells relative to normal cells, as disclosed above for the signature gene set (or sets) used for practicing the invention, may be found, using appropriate probes, either DNA or RNA, to be present in as little as 60% of cells derived from a sample of tumorous, or malignant, tissue while being absent from as much as 60% of cells derived from corresponding non-cancerous, or otherwise normal, tissue (and thus being present in as much as 40% of such normal tissue cells). In a preferred embodiment, such gene pattern is found to be present in at least 70% of cells drawn from a cancerous tissue and absent from at least 70% of a corresponding normal, non-cancerous, tissue sample. In an especially preferred embodiment, such gene pattern is found to be present in at least 80% of cells drawn from a cancerous tissue and absent from at least 80% of a corresponding normal, non-cancerous, tissue sample. In a most preferred embodiment, such gene pattern is found to be present in at least 90% of cells drawn from a cancerous tissue and absent from at least 90% of a corresponding normal, non-cancerous, tissue sample. In an additional embodiment, such gene pattern is found to be present in at least 100% of cells drawn from a cancerous tissue and absent from at least 100% of a corresponding normal, non-cancerous, tissue sample, although the latter embodiment may represent a rare occurrence.

[0083] Conversely, where the signature set (such as SEQ ID NO: 227-279) is expressed or up-regulated in normal cells versus cancerous cells, as disclosed herein, expression in the normal cells but not in suspected cancerous cells may confirm a cancerous state in the suspected cancerous sample. The same is true for assays disclosed herein for potential antitumor agents.

[0084] Although the presence or absence of expression of one or more selected gene sequences may be indicative of a cancerous status for a given cell, the mere presence or absence of such a gene pattern may not alone be sufficient to achieve a malignant condition and thus the level of expression of such gene pattern may also be a significant factor in determining the attainment of a cancerous state. While a pattern of gene expression may be present in both cancerous and non-cancerous cells, the relative level of expression, as determined by any of the methods disclosed herein, all of which are well known in the art, may differ between the cancerous versus the non-cancerous cells. Thus, it becomes essential to also determine the level of expression of one or more of said genes as a separate means of diagnosing the presence of a cancerous status for a given cell, groups of cells, or tissues, either in culture or in situ.

[0085] In accordance with the invention disclosed herein, a determination of an anticancer agent using the signature gene sets for ovary described herein is based on patterns of modulation of such genes so that increase or decrease in expression of a gene due to the presence of such a potential agent may or may not be meaningful. Thus, the more genes in a gene set as disclosed herein that are affected by said agent the more likely said agent is an effective therapeutic agent.

[0086] In addition, different agents may have different abilities to affect the genes of a signature gene set. For example, if a potential therapeutic agent, say, agent A, causes a gene or group of genes of a characteristic or signature gene set, or even all of the genes of said gene set, to exhibit decreased expression, such as where a lower amount of mRNA is expressed from said gene(s), or less protein is produced from said mRNA, but a second potential agent, say, agent B, while modulating the activity of the same or related genes causes said expression to be reduced to half, such as where only half as much mRNA is transcribed or only half as much protein is translated from said mRNA as for agent A, then agent B is considered to have twice as much therapeutic potential as agent A.

[0087] Such modulation or change of activity as determined using the assays disclosed herein may include either an increase or a decrease in activity of said genes or gene sequences. Thus, where a gene is expressed in cancer cells but not in normal cells, or is up-regulated in cancer cells relative to normal cells, of the same organ or tissue type, an agent that down-regulates said gene or genes, or gene sequences, or prevents their expression entirely, is considered a potential antitumor agent within the present disclosure. Conversely, where an agent causes expression of a gene or genes, or gene sequences, expressed in normal cells but not in cancer cells, or where said agent up-regulates a gene or genes, or gene sequences, that are expressed in normal cells but not in cancer cells, or are up-regulated in normal cells but not in cancer cells, of the same organ or tissue type, said agent is considered to be a potential antitumor agent within the present disclosure.

[0088] The present invention also relates to a process that comprises a method for producing a product comprising identifying an agent according to one of the disclosed processes for identifying such an agent (such as the therapeutic agents identified according to the assay procedures disclosed herein) wherein said product is the data collected with respect to said agent as a result of said identification process, or assay, and wherein said data is sufficient to convey the chemical character and/or structure and/or properties of said agent. For example, the present invention specifically contemplates a situation whereby a user of an assay of the invention may use the assay to screen for compounds having the desired enzyme modulating activity and, having identified the compound, then conveys that information (i.e., information as to structure, dosage, etc) to another user who then utilizes the information to reproduce the agent and administer it for therapeutic or research purposes according to the invention. For example, the user of the assay (user 1) may screen a number of test compounds without knowing the structure or identity of the compounds (such as where a number of code numbers are used the first user is simply given samples labeled with said code numbers) and, after performing the screening process, using one or more assay processes of the present invention, then imparts to a second user (user 2), verbally or in writing or some equivalent fashion, sufficient information to identify the compounds having a particular modulating activity (for example, the code number with the corresponding results). This transmission of information from user 1 to user 2 is specifically contemplated by the present invention.

[0089] In accordance with the foregoing, the present invention further relates to a process for determining the cancerous status of a cell to be tested, comprising determining the level of expression in said cell of at least one gene that includes one of the nucleotide sequences selected from the sequences of SEQ ID NO: 1-325, including sequences substantially identical to said sequences, or characteristic fragments thereof, or the complements of any of the foregoing and then comparing said expression to that of a cell known to be non-cancerous whereby the difference in said expression indicates that said cell to be tested is cancerous.

[0090] In specific embodiments of the present invention, said expression is determined for more than one of said genes, such as 2, 3, 4, 5, or more such genes, considered as a set, and even as many as a set of 10 such genes. A set of genes, for example, 5 such genes, may be found to be expressed at certain levels in cancer cells but are found to be expressed at lower levels (or not expressed at all) in non-cancerous, or normal, cells. Conversely, a set of, for example, 5 such genes may be found to be expressed in normal (i.e., non-cancerous) cells but expressed at lower levels (or not expressed at all) in cancer cells. Thus, by determining the set or pattern of genes expressed in cancer cells but expressed at lower levels (or not at all) in non-cancer, or vice versa, a method is achieved for diagnosing cancerous conditions wherein said genes are selected from those that include one of the sequences, or fragments of sequences, including complementary sequences, selected from SEQ ID NO: 1-325. Using the methods disclosed herein, ovary or other cancers can be readily detected using the methods of the present invention.

[0091] In accordance with the invention, although gene expression for a gene that includes as a portion thereof one of the nucleotide sequences of SEQ ID NO: 1-325, is preferably determined by use of a probe that is a fragment of such nucleotide sequence, it is to be understood that the probe may be formed from a different portion of the gene. Thus, for each gene of the signature set of the present invention, the nucleotide sequence disclosed with respect to a specific sequence ID number may be only a portion of the nucleotide sequence that encodes expression of the gene. As a result, expression of the gene may be determined by use of a nucleotide probe that hybridizes to messenger RNA (mRNA) transcribed from a portion of the gene other than the specific nucleotide sequence disclosed with reference to a sequence ID number as recited herein.

[0092] The present invention further relates to a process for determining a cancer initiating, facilitating or suppressing gene comprising the steps of contacting a cell with a cancer modulating agent and determining a change in expression of a gene selected from the group consisting of the gene sequences of SEQ ID NO: 1-325 and thereby identifying said gene as being a cancer initiating or facilitating gene.

[0093] Thus, some or all of the genes within the signature gene sets disclosed herein as SEQ ID NO: 1-325 are found to play a direct role in the initiation or progression of cancer or even other diseases and disease processes. Because changes in expression of these genes (either up-regulation or down-regulation) are linked to the disease state (i.e. cancer), the change in expression may contribute to the initiation or progression of the disease. For example, if a gene that is up-regulated is an oncogene, or if a gene that is down-regulated is a tumor suppressor, such a gene provides for a means of screening for small molecule therapeutics beyond screens based upon expression output alone. For example, genes that display up-regulation in cancer and whose elevated expression contributes to initiation or progression of disease represent targets in screens for small molecules that inhibit or block their function. Examples include, but are not be limited to, kinase inhibition, cellular proliferation, substrate analogs that block the active site of protein targets, etc. Similarly, genes that display down-regulation in cancer and whose absence results in initiation or progression of disease are valuable therapeutics for gene therapy.

[0094] In accordance therewith, the present invention relates to a process for determining a cancer initiating or facilitating gene comprising contacting a cell expressing a test gene (one whose status as a cancer initiating or facilitating gene is to be determined) with an agent that decreases the expression of a gene corresponding to a polynucleotide having a sequence selected from the group consisting of SEQ ID NO: 1-226 and 280-325, and detecting a decrease in expression of said test gene compared to when said agent is not present, thereby identifying said test gene as being a cancer initiating or facilitating gene. Such genes may, of course, be oncogenes and said decrease in expression may be due to a decrease in copy number of said gene in said cell or a cell derived from said cell, such as where copy number is reduced following cellular replication.

[0095] The present invention also relates to a process for determining a cancer suppressor gene comprising contacting a cell expressing a test gene (one whose status as a cancer suppressor gene is to be determined) with an agent that increases the expression of a gene that encodes an RNA at least 95% identical to an RNA encoded by (i.e., corresponds to) a polynucleotide having a sequence selected from the group consisting of SEQ ID NO: 227-279 and detecting an increase in expression of said test gene compared to when said agent is not present, thereby identifying said test gene as being a cancer suppressor gene. The sequence identity may include identical sequences, as defined herein, and such a process includes embodiments wherein the increase in expression is due to an increase in copy number of the gene in said cell or a cell derived from said cell, such as by cellular replication. Such increase in expression may also include the induction of expression in a cell, especially a cancer cell, such as a ovary cancer cell, where such expression is not detectable in the absence of the agent.

[0096] It should be noted that there are a variety of different contexts in which genes have been evaluated as being involved in the cancerous process. Thus, some genes may be oncogenes and encode proteins that are directly involved in the cancerous process and thereby promote the occurrence of cancer in an animal. In addition, other genes may serve to suppress the cancerous state in a given cell or cell type and thereby work against a cancerous condition forming in an animal. Other genes may simply be involved either directly or indirectly in the cancerous process or condition and may serve in an ancillary capacity with respect to the cancerous state. All such types of genes are deemed with those to be determined in accordance with the invention as disclosed herein. Thus, the gene determined by said process of the invention may be an oncogene, or the gene determined by said process may be a cancer facilitating gene, the latter including a gene that directly or indirectly affects the cancerous process, either in the promotion of a cancerous condition or in facilitating the progress of cancerous growth or otherwise modulating the growth of cancer cells, either in vivo or ex vivo. In addition, the gene determined by said process may be a cancer suppressor gene, which gene works either directly or indirectly to suppress the initiation or progress of a cancerous condition. Such genes may work indirectly where their expression alters the activity of some other gene or gene expression product that is itself directly involved in initiating or facilitating the progress of a cancerous condition. For example, a gene that encodes a polypeptide, either wild or mutant in type, which polypeptide acts to suppress of tumor suppressor gene, or its expression product, will thereby act indirectly to promote tumor growth.

[0097] In accordance with the foregoing, the process of the present invention includes cancer modulating agents that are themselves either polypeptides, or small chemical entities, that affect the cancerous process, including initiation, suppression or facilitation of tumor growth, either in vivo or ex vivo. Said cancer modulating agent may have the effect of increasing gene expression or said cancer modulating agent may have the effect of decreasing gene expression as such terms have been described herein.

[0098] In keeping with the present disclosure, the present invention also relates to a process for treating cancer comprising contacting a cancerous cell with an agent having activity against an expression product encoded by a gene sequence selected from the group consisting of SEQ ID NO: 1-325. More specifically, the present invention relates to a process for treating cancer comprising contacting a cancerous cell with an agent having activity against an expression product encoded by a gene sequence selected from the group consisting of SEQ ID NO: 1-226 and 280-325. Such a process includes an embodiment wherein the cancerous cell is contacted in vivo. Such treatment includes treatment of a patient, such as a human being. The agent may include an antibody that reacts with a polypeptide encoded by such a gene.

[0099] Thus, some or all of the genes within these signature gene sets represent individual targets for therapeutic intervention, based at least in part on their pattern(s) of expression. For example, genes within the signature gene sets that encode cell surface molecules and are up-regulated in cancer as compared to normal cells. The proteins encoded by such genes, due to their elevated expression in cancer cells, represent highly useful therapeutic targets for “targeted therapies” utilizing such affinity structures as, for example, antibodies coupled to some cytotoxic agent. In such methodology, it is advantageous that nothing need be known about the endogenous ligands or binding partners for such cell surface molecules. Rather, an antibody or equivalent molecule that can specifically recognize the cell surface molecule (which could include an artificial peptide, a surrogate ligand, and the like) that is coupled to some agent that can induce cell death or a block in cell cycling offers therapeutic promise against these proteins. Thus, such approaches include the use of so-called suicide “bullets” against intracellular proteins

[0100] The process of the present invention includes embodiments of the above-recited process wherein said cancer cell is contacted in vivo as well as ex vivo, preferably wherein said agent comprises a portion, or is part of an overall molecular structure, having affinity for said expression product. In one such embodiment, said portion having affinity for said expression product is an antibody, especially where said expression product is a polypeptide or oligopeptide or comprises an oligopeptide portion, or comprises a polypeptide.

[0101] Such an agent can therefore be a single molecular structure, comprising both affinity portion and anti-cancer activity portions, wherein said portions are derived from separate molecules, or molecular structures, possessing such activity when separated and wherein such agent has been formed by combining said portions into one larger molecular structure, such as where said portions are combined into the form of an adduct. Said anti-cancer and affinity portions may be joined covalently, such as in the form of a single polypeptide, or polypeptide-like, structure or may be joined non-covalently, such as by hydrophobic or electrostatic interactions, such structures having been formed by means well known in the chemical arts. Alternatively, the anti-cancer and affinity portions may be formed from separate domains of a single molecule that exhibits, as part of the same chemical structure, more than one activity wherein one of the activities is against cancer cells, or tumor formation or growth, and the other activity is affinity for an expression product produced by expression of genes related to the cancerous process or condition.

[0102] In one embodiment of the present invention, a chemical agent, such as a protein or other polypeptide, is joined to an agent, such as an antibody, having affinity for an expression product of a cancerous cell, such as a polypeptide or protein encoded by a gene related to the cancerous process, especially a gene sequence corresponding to one selected from the group consisting of the sequences of SEQ ID NO: 1-226 and 280-325. In a specific embodiment, said expression product is a cell surface receptor, such as a protein or glycoprotein or lipoprotein, present on the surface of a cancer cell, such as where it is part of the plasma membrane of said cancer cell, and acts as a therapeutic target for the affinity portion of said anticancer agent and where, after binding of the affinity portion of such agent to the expression product, the anti-cancer portion of said agent acts against said expression product so as to neutralize its effects in initiating, facilitating or promoting tumor formation and/or growth. In a separate embodiment of the present invention, binding of the agent to said expression product may, without more, have the effect of deterring cancer promotion, facilitation or growth, especially where the presence of said expression product is related, either intimately or only in an ancillary manner, to the development and growth of a tumor. Thus, where the presence of said expression product is essential to tumor initiation and/or growth, binding of said agent to said expression product will have the effect of negating said tumor promoting activity. In one such embodiment, said agent is an apoptosis-inducing agent that induces cell suicide, thereby killing the cancer cell and halting tumor growth.

[0103] In alternative embodiments of the foregoing, the present invention relates to a process for treating a cancerous condition in an animal afflicted therewith comprising administering to said animal a therapeutically effective amount of an agent first identified as having anti-neoplastic activity using an assay process as disclosed herein according to the present invention, such as a cancer-related gene modulator as identified according to the processes of the invention. Such processes also include the ability to protect against development of a cancerous state by using agents identified by the assay processes of the invention. Thus, the present invention specifically contemplates a process for protecting an animal against cancer comprising administering to an animal at risk of developing cancer a therapeutically effective amount of an agent first identified as having anti-neoplastic activity using one or more of the assay processes disclosed herein for identifying such agents.

[0104] The processes of the present invention take advantage of the correlation of changes in mRNA expression profiles of these signature gene sets with potential (depending on the form of cancer) changes in DNA copy number of the chromosomal regions wherein these genes are located. Of course, the precise nature of the change in mRNA expression (e.g. a signature set of genes that are up-regulated at the transcriptional level) may also indicate a change in the DNA copy number for the genomic regions in which these genes are located (e.g. an amplification of the genomic DNA region that contains the involved gene or genes).

[0105] Many cancers contain chromosomal rearrangements, which typically represent translocations, amplifications, or deletions of specific regions of genomic DNA. A recurrent chromosomal rearrangement that is associated with a specific stage and type of cancer always affects a gene (or possibly genes) that play a direct and critical role in the initiation or progression of the disease. Many of the known oncogenes or tumor suppressor genes that play direct roles in cancer have either been initially identified based upon their positional cloning from a recurrent chromosomal rearrangement or have been demonstrated to fall within a rearrangement subsequent to their cloning by other methods. In all cases, such genes display amplification at both the level of DNA copy number and at the level of transcriptional expression at the mRNA level.

[0106] At least some of the genes that are contained within signature gene sets disclosed herein (SEQ ID NO: 1-226 and 280-325) display changes in their mRNA expression profiles (depending on the precise reading frame involved) within cancer samples due, in part, to changes in their DNA copy number as a result of specific chromosomal rearrangements in those cancer cells. The utilities that follow from this are (i) that the genes contained within these signature gene sets offer a time saving shortcut to the identification of novel chromosomal rearrangements, amplifications, or deletions that are associated with cancer, and/or (ii) represent key genes affected by such chromosomal rearrangements, amplifications, or deletions and, therefore, play a key role in the initiation or progression of the disease. Genes within the signature sets that identify changes in the DNA copy number (based upon their changes in expression at the mRNA level) afford an entry point into other forms of diagnostic assay for the initiation, staging, or progression of cancer to be conducted in tissue samples at the DNA level (e.g. if gene X identifies a novel chromosomal amplification associated with cancer, then that specific chromosomal region defined by gene X would serve as the basis for a diagnostic assay for cancer, where genomic DNA is extracted from tissue samples and evaluated for the presence of the specific amplification), and also the rapid positional cloning of genes that play vital and direct roles in the initiation or progression of cancer.

[0107] In one embodiment of the present invention, said change in expression may be determined by determining a change in gene copy number, wherein said change in copy number is an increase in copy number or wherein said change in copy number is a decrease in copy number. For example, copy number of a sequence expressed, or over-expressed, in a cancerous cell may be decreased due to the presence of an anti-neoplastic agent as identified according to the assays procedures of the present invention.

[0108] A change in gene copy number may be determined by determining a change in expression of messenger RNA encoded by a particular gene sequence, especially where said sequence is one selected from the group consisting of the sequences of SEQ ID NO: 1-325, especially SEQ ID NO: 1-226 (the latter being expressed in cancer cells but not expressed at detectable levels in normal cells) and 280-325 (the latter being expressed in cancer cells but not at detectable levels in normal cells). Also in accordance with the present invention, said gene may be a cancer initiating gene, a cancer facilitating gene, or a cancer suppressing gene. In carrying out the methods of the present invention, a cancer facilitating gene is a gene that, while not directly initiating or suppressing tumor formation or growth, said gene acts, such as through the actions of its expression product, to direct, enhance, or otherwise facilitate the progress of the cancerous condition, including where such gene acts against genes, or gene expression products, that would otherwise have the effect of decreasing tumor formation and/or growth.

[0109] The present invention also relates to a process for treating cancer comprising inserting into a cancerous cell a gene construct comprising an anti-cancer gene operably linked to a promoter or enhancer element such that expression of said anti-cancer gene causes suppression of said cancer and wherein said promoter or enhancer element is a promoter or enhancer element modulating a gene sequence selected from the group consisting of the sequences of SEQ ID NO: 227-279.

[0110] The signature sets or signature gene sets disclosed herein are useful in identifying genetic regulatory elements within the promoters of the genes contained within the signature sets that are specific to normal tissue and/or the corresponding cancer. Each signature set is a collection of genes that share a gross common pattern of transcriptional regulation in cancer vs. normal (e.g. a signature set of genes that are transcriptionally up-regulated in cancer).

[0111] In one such embodiment, analyzing and comparing the DNA sequences of the promoter regions of all the genes contained within the signature set serves to identify conserved stretches or motifs of sequences within subsets of genes that represent cis-acting elements that specifically drive a form of gene expression (e.g. increased transcriptional expression in cancer). The identification of such cis-acting regulatory elements is then available for use in driving the cancer-specific expression of suicide genes or toxins via genetic therapy using technology already well known in the art.

[0112] In separate embodiments, said anti-cancer gene is a cancer suppressor gene or encodes a polypeptide having anticancer activity, especially where said polypeptide has apoptotic activity.

[0113] In additional embodiments, such insertion of the gene construct into a cancerous cell is accomplished in vivo, for example using a viral or plasmid vector. Such methods can also be applied to in vitro uses. The methods of the present invention are readily applicable to different forms of gene therapy, either where cells are genetically modified ex vivo and then administered to a host or where the gene modification is conducted in vivo using any of a number of suitable methods involving vectors especially suitable to such therapies, such as the use of special viral vectors, including adeno-associated viruses and adenoviruses, as well as retroviruses and specially constructed plasmids to accomplish such therapies. The use of these and other vectors is well known to those skilled in the art and need not be described further.

[0114] The present method also relates to a process for determining functionally related genes comprising contacting one or more gene sequences selected from the group consisting of the sequences of SEQ ID NO: 1-325 with an agent that modulates expression of more than one gene in such group and thereby determining a subset of genes of said group.

[0115] In accordance with the present invention, said functionally related genes are genes modulating the same metabolic pathway or said genes are genes encoding functionally related polypeptides. In one such embodiment, said genes are genes whose expression is modulated by the same transcriptional activator or enhancer sequence, especially where said transcriptional activator or enhancer increases, or otherwise modulates, the activity of a gene sequence selected from the group consisting of SEQ ID NO: 1-325. In specific embodiments, the sequences may be SEQ ID NO: 1-226 and 280-325 or may be SEQ ID NO: 227-279, or subsets thereof.

[0116] In one such embodiment, small molecule screens serve to identify changes in expression of genes within a signature set and thereby provide a tool for the identification of specific functional pathways and a means of assigning defined functions to novel genes.

[0117] In situations where a signature set of genes that are transcriptionally up-regulated in cancer cells compared to normal cells, such screens facilitate the identification of small molecules that down-regulate the expression of the genes of the signature set within cancer cells. While such therapeutics make a cancer cell “look” more normal, based upon the expression of the genes within the signature set, what actually happens when such screens are put into practice is that all genes within the signature sets do not respond identically to each small molecule within a chemical compound library. If an average signature set contains 200 different genes, for example, and the expression of all 200 genes is monitored in response to a library of some 50,000 chemical compounds, and subsets of genes within the signature set consistently change their patterns of expression in response to particular chemicals (e.g., 10 of the genes always change expression in a coordinated way, such as down-regulation of one gene within the group of 10) then it always causes the down-regulation of the other 9 specific genes as well.

[0118] Such subsets or subgroups of genes within each signature set that change their expression in a coordinated way in response to chemical compounds represent genes that are located within a common metabolic, signaling, physiological, or functional pathway so that by analyzing and identifying such subsets one can (a) assign known genes and novel genes to specific pathways and (b) identify specific functions and functional roles for novel genes that are grouped into pathways with genes for which their functions are already characterized or described. For example, one might identify a subgroup of 10 genes within a signature set (5 known genes and 5 novel genes) that change expression in a coordinated fashion and for which the 5 known genes are involved in apoptosis thereby implicating the other 5 novel genes as playing a role in apoptotic cellular processes. Therefore, the processes disclosed according to the present invention at once provide a novel means of assigning function to genes, i.e. a novel method of functional genomics, and a means for identifying chemical compounds that have potential therapeutic effects on specific cellular pathways. Such chemical compounds may have therapeutic relevance to a variety of diseases outside of cancer as well, in cases where such diseases are known or are demonstrated to involve the specific cellular pathway that is affected.

[0119] It should be cautioned that, in carrying out the procedures of the present invention as disclosed herein, any reference to particular buffers, media, reagents, cells, culture conditions and the like are not intended to be limiting, but are to be read so as to include all related materials that one of ordinary skill in the art would recognize as being of interest or value in the particular context in which that discussion is presented. For example, it is often possible to substitute one buffer system or culture medium for another and still achieve similar, if not identical, results. Those of skill in the art will have sufficient knowledge of such systems and methodologies so as to be able, without undue experimentation, to make substitutions that will optimally serve their purposes in using the methods and procedures disclosed herein. The present invention will now be further described by way of the following non-limiting example but it should be kept clearly in mind that other and different embodiments of the methods disclosed according to the present invention will no doubt suggest themselves to those of skill in the relevant art.

### EXAMPLE

[0120] SW480 cells (or other sells of choice, cancerous or normal, such as ovary cancer cells or cell lines) are grown to a density of 226 cells/cm² in Leibovitz's L-medium supplemented with 2 mM L-glutamine (90%) and 10% fetal bovine serum. The cells are collected after treatment with 0.25% trypsin, 0.02% EDTA at 37° C. for 2 to 5 minutes. The trypsinized cells are then diluted with 30 ml growth medium and plated at a density of 50,000 cells per well in a 96 well plate (200 μL/well). The following day, cells are treated with either compound buffer alone, or compound buffer containing a chemical agent to be tested, for 24 hours. The media is then removed, the cells lysed and the RNA recovered using the RNAeasy reagents and protocol obtained from Qiagen. RNA is quantitated and ng of sample in 1 μl are added to 24 μl of Taqman reaction mix containing 1× PCR buffer, RNAsin, reverse transcriptase, nucleoside triphosphates, amplitaq gold, tween 20, glycerol, bovine serum albumin (BSA) and specific PCR primers and probes for a reference gene (18S RNA) and a test gene (Gene X). Reverse transcription is then carried out at 48° C. for 30 minutes. The sample is then applied to a Perkin Elmer 7700 sequence detector and heat denatured for 10 minutes at 95° C. Amplification is performed through 40 cycles using 15 seconds annealing at 60° C. followed by a 60 second extension at 72° C. and 30 second denaturation at 95° C. Data files are then captured and the data analyzed with the appropriate baseline windows and thresholds.

[0121] The quantitative difference between the target and reference genes is then calculated and a relative expression value determined for all of the samples used. This procedure is then repeated for each of the target genes in a given signature, or characteristic, set and the relative expression ratios for each pair of genes is determined (i.e., a ratio of expression is determined for each target gene versus each of the other genes for which expression is measured, where each gene's absolute expression is determined relative to the reference gene for each compound, or chemical agent, to be screened). The samples are then scored and ranked according to the degree of alteration of the expression profile in the treated samples relative to the control. The overall expression of the set of genes relative to the controls, as modulated by one chemical agent relative to another, is also ascertained. Chemical agents having the most effect on a given gene, or set of genes, are considered the most anti-neoplastic.

[0122] In carrying out the methods of the invention, it is to be expected that not all cells of a given sample of suspected cancerous cells will express all, or even most, of these genes but that a substantial expression thereof in a substantial number of such cells is sufficient to warrant a determination of a cancerous, or potentially cancerous, condition. The sequences disclosed herein are represented by SEQ ID NO: 1 to 325 although different genes are more or less relevant to different organs and tissues and some may be up-regulated in cancer and not normal cells while others are up-regulated in normal cells but not cancerous cells. The sequences presented herein may be genomic, synthetic or cDNA sequences and may also be represented as RNA sequences. The sequences of the sequence listing herein are mostly cDNA sequences but can be used to locate genomic sequences.

The application's sequence listing, which the Patent Office published only in electronic form, follows.

SEQUENCE LISTING (325 sequences)

SEQ ID NO: 1 - DNA, 453 bp, Homo sapiens
  misc_feature (1)...(453): n=a,t,g or c
ttttttatatacacagcatttttattaaatatactctgtgagaaaaagaacaccctaaagtgccagatttcatgtaaatccaataacttagtaaatacaatggtgaaaaaaaatcngagggaaacataatttaaataatcttataaaagagcaagaacatatcttaatcttaagaaaacaatcatcaaaatataaaagggaaagaaatctcttttgtagaagaatatatttcaaattccacctgttgatcatttcatttaaaaaattctattctaaacacatgggcagtctctcttaccaatatatatatttaaatcaatgggtagaaagggaatttagactactcattcacactgagataaagtgacatttttgttgcacaacagtattgctcactgggcactaacagtgggaagatggagaaagtagatttctgggattcaattggttagc

SEQ ID NO: 2 - DNA, 287 bp, Homo sapiens
ttttttttttttttttttttttctatctgtgaaaaacatttattctgagaatctaaaatctggacaaagtactggactttagaaaaagcctacacaaaattgtctcattcttccctaatacattaataatctaagaataaggaggtgaaaaaaaccctttaaaaataacattgctccagtttgtctgcaggtatgtgatttaaaatatccctgttttattgaggtataggctgcaaactttggtaaaattaggaaaaattaacaaaccctttcaaaagaaaaaaaat

SEQ ID NO: 3 - DNA, 411 bp, Homo sapiens
  misc_feature (1)...(411): n=a,t,g or c
tttntntgcaaagagaaataggctcgtttattnattcattgatcaactggcacttcttgaaancctgctgtgtgccaagcctttccccaaaggaggatatcagtgnnnnagnaagtctcagggtggaaaggacctggaccacacagagcaggactccagagcctcctccatatggcaggaatcaagctttcacaggggaaacgcaggatttcccacacatgcccatgcaacacttcaagtcacgcttgcactggccatccatctcacagaaattgggggggttnagcatcnaacattggccanaantcactnggnacttnccaagggttncnccttgttgggnttnggggggtnnacaggggncccggcanttnatgcnccaagtttcngggcaaanatttcttttttccc

SEQ ID NO: 4 - DNA, 329 bp, Homo sapiens
  misc_feature (1)...(329): n=a,t,g or c
tttttttgggatgcagcactttctttattgcccatccagggaacagccaagccagctccatctgcattctggctgcagcgtgtacattaggggactcaggggccacagtgtgggaccgtgcacactggcaaggcactggcggatntgggcaggccagttggacatggatagatgagaatgacaactcacagatgtcctagcttctgctggcccagctgccancactgncatcacccttttgcccagcatgtgtgcattgtcacccaaaacatcttgaaacttgccattagtgaggcattcaacaaagaagtaagctaagtgagtaggaa

SEQ ID NO: 5 - DNA, 492 bp, Homo sapiens
  misc_feature (1)...(492): n=a,t,g or c
aactttttaaacaatccattttaatcatctaaattatttacaatacaataacatggattcatcctttttaagacatgggattgtaaaaatcaacaagtgaatgatgcttcaaataatacatttaaatacattaatcaaattttttcagtgcttaaaactttttctccatgggacagcaggctctggacaaaagtgcctagcatacaagttttcccaatttccttctatcataccagctgcacataaaaaggttcatcacctcctgtctccaaagtgtctccctactgagtgttcccaggcagacaatagttcctgggatagtgctgtttggtaacagaaaagcccaagcgtagaggacagattaaaaggcagggaccagaccaccatgggatacaaatccccaagacagaggatgcccccatgcctttcccccatgaagccttatccngtctgcctggtatctcccatgattgccagggcatagggctactt

SEQ ID NO: 6 - DNA, 268 bp, Homo sapiens
  misc_feature (1)...(268): n=a,t,g or c
catctaatggctggttatttttacagatgccaagtttacaaaacatacaagtgcacagacaggtgtgggaggtagctcgaaatatacagagtgttcgcaacactagagacgtcttctggccgccatcaggggactcggaggtagggtaggcttggtgaggcccgtgnttcgtgtccgtggcacagcctcctgcaaaggggctgccctgctcccctgttcacatggtgccaggccgtgctccccaggtgcctccgggggtgctgaagaa

SEQ ID NO: 7 - DNA, 551 bp, Homo sapiens
  misc_feature (1)...(551): n=a,t,g or c
ntacattatggaaatttatncctcctgaatgtataaggcaggagactaattcaatatacattcactatgcagaattctacaagttctgggctatgtgtaaatgtgccccccttccctccattatcaggatgtttaaatgtgtttcctttttttcatttaaaactttgcttagatgttttacattgccatcacctcttcctgagaaaaaggtgtgtcccccaccccaacccctaggagccangcagactatcttnctgaggggccacaagcacactcccacngtggagaacaagggcagtggatgaagggaacggggatttttcaaactaatgttttccctcaaacaggcctcccggcgccngttagacttgaagcaatgacatctattaaaatggggaccccagctgggggttaagaatgttngtttaagaatgatgacgatatcttgaaaagaaattcttggctggggatggngtagggggaaagggaaaaaaattaattattttgactttcccattggcaatgcttgctacgtttaatctgattgcatt

SEQ ID NO: 8 - DNA, 115 bp, Homo sapiens
aaaatgtggaactagtattcattttttattcaaatattttataaattatcatattggaggccctatagtgtggtagtttacagcatgaactctgtattccaagtgctcacgttcc

SEQ ID NO: 9 - DNA, 328 bp, Homo sapiens
  misc_feature (1)...(328): n=a,t,g or c
tttttttttttgtttaaaatcatttattattatcaggagtgccttttaggtggaccgctctgtatgactctcatgcttcaaaactattttttattcaagtgacttacaatggccctaggaaacaagttctgttattatcccccattttaaaatgatgaaaatggacaaagcaaaagcaagcaacttaaccaataccccatggcctcacagcctttagaatagtcatattatataaatatggcaataacaatgcnctgaaaatgtctccaaaacaaactctacattttaaaaaatgtataacaggaatctaaggaaggggtcttacttc

SEQ ID NO: 10 - DNA, 374 bp, Homo sapiens
gagaggtctgctactttattttgataatgcagggatattatttatctttgcagaatcaggtgactcccaacgttcccggaatcttctagtggtctgtgtcaggggtctgggctggctggggttcagtgatgtctactggaggcagcttccatgccttctggggtcctgagtctccatggcttgtggggtctgggtcccccctggattagtggatggccagagtggcatagacactgggctcagctggagaggccccttcctgggatggaggaggctcagttgccttctgtctgaagggtaaaagctgtgcagctgggcgtaggtcacatcctggggggcttcagatgcagcagcctcagtgtccatctgtctgt

SEQ ID NO: 11 - DNA, 261 bp, Homo sapiens
gagggaaagacaaaacgtatttattccaggccaggtcttaaaatgcacactgcacggttccctgttgttatcagcaccagtaaggaaagaacgtgccttaacggcagccccacccagagcctgctgcgtggctgctgtgaggctccccatgaatccacgcagtcttcttcctcactggtgcagttggtgaggttttctaccctcacagcaaagggatccttaactataaattcacggtatgcagagaagaggacagaatct

SEQ ID NO: 12 - DNA, 257 bp, Homo sapiens
  misc_feature (1)...(257): n=a,t,g or c
ttccatccacgtgtgtttattttagatgctttctgtgtgggagctggggagacaggtcagtaggacccacgcctgtgcctgaggggccccagtctgggcaagtggtcccagccnttcacaaggctgcacacactccctgtgcactcgcagaggcttctctgaggaggaggctgtgaaggaggccacgaatgcaaggacatttccaggcaggcatcctaggtgcagggacctgccgcccaaagccagagaggtgaggt

SEQ ID NO: 13 - DNA, 549 bp, Homo sapiens
  misc_feature (1)...(549): n=a,t,g or c
gttctgctctcccatcaagcttcagatgccatgttgtactgggggaatgtagcccttgtgctccccaccccctacctccacctgagcctcaccctgctgttgagccctgagtggctaggggaaatgggaagaggattgccatggcctggccatcttgttgctgctaggttagatcatatagctaatgaattaggcaggggagctattttttgaagatgatgaattaaatgttgaagacaagtttgagatctgtaaaatgtgattttttacttccacttataatacttgtgattggggaggtttgtggaaattcaattatgatgaaaaacctatcttttttgtaatgttggcatacttggggaatttagtggcaaatacattccccagcaggccttttgttggttgcactaactgcaagggttgcctgggaagntagagtcccattttggttgatgaagctttgaactgcggttttggaaccttacctctcctcctttagcccaatatgctgtcttgggtcctattcaaataaagttatttcctcctgga

SEQ ID NO: 14 - DNA, 399 bp, Homo sapiens
  misc_feature (1)...(399): n=a,t,g or c
ttgcagtcagtgggttttatttgangagggggttttctgctgaactgagatggggttgattgaacggggacagagcgaagactggcagagggcacacacgggaccctggccactcccgggaccctgaccactcctaggctaggtccttcatgtcttcagtcaggcgagcctggggccccctgggnatgagcctgcatcctgagtgggcacccccgacccatgacaagcctcctgcaagggcagcttctagctcatggtccgtgagtcactcggggctggtcaccgggcactgggaaggtggccagagccgcgtctggggggccgagccaagcaacagcagcagcagcaggtgggcccaggcaaggcgggctgttgtcagagccttcctgcagctgctgc

SEQ ID NO: 15 - DNA, 518 bp, Homo sapiens
  misc_feature (1)...(518): n=a,t,g or c
actcaatagttgagtttggctgttgttgcaggaaaatgattataactaaaagctctctgatagtgcagagacttaccagaagacacaaggaattgtactgaagagctattacaatccaaatattgccgtttcataaatgtaataagtaatactaattcacagagtattgtaaatggtggatgacaaaagaaaatctgctctgtggaaagaaagaactgtctctaccagggtcaagagcatgaacgcatcaatagaaagaactcggggaaacatcccatcaacaggactacacacttgtatatacattcttggagaacactgcaatgttgaaaatccacgtttgctatttataaacttgtccttagattaatgtgtctggacagattgtgggagtaagtgattcttctaagaattagatacttgtcactgcctatacctgcagctggactgaatgggacttcgtatggttaatagttggttcnggataaatccatgccaattaaaggtaaagtgatgcc

SEQ ID NO: 16 - DNA, 539 bp, Homo sapiens
  misc_feature (1)...(539): n=a,t,g or c
atagtaagaaaatgtcaatttaatcatttactttagcaggcaagcaatttgtaaacattcagtagcggcagatccaagttacaaacaatttaaaaagaaccaagattagtgattataatttttccttccctttccccaaaagaaaaaaaaaatgatttggaaatgaatgacttaaaaccctacaaacattgaacattcagttatgtcttctatcagccttctatgcatcctctctgttttattttaaaagatgtatctactcctaaaatgcnttatcttgtaataacttgtacgtgagcacttgcaatctaggaagttgttcctgcacatcactgtgcatatattatcttagtttaaatcccatttgcaaagggaatatttatgtcttgattcaatggcctcttgacttcgagtgggcgggtatcaaaaaggtgatcttccacaacaaggcccgcttttctgagcatccgacactgggcccagctggctggccagggcggtccaagcagttccccttcagctccagctgagtgagccgg

SEQ ID NO: 17 - DNA, 421 bp, Homo sapiens
  misc_feature (1)...(421): n=a,t,g or c
tttttttttttgggggatgtgatagagaggatttattcatttgataatagttagaacacataacctctgagatctctgtaatctcagatactttagttctataattctaaatccaagggtctctatagataggcttgagacaagtgtaaacaaactcatgatctcagagaaatcttcaagtggcatgtttcaatggtatgcttattaaacaaatgctcatgacagattttcacaacagtaacgaatgttatttcacaacatcaaatcttccttcctcaggaagaaatgacattaataagaaggttgatggatttggattatttttcatgtttcctggaggtaaaaccagngtcccccacttgnttttccncctttttcccccaattttgnagactatttgggtttcaatttccttgcctcc

SEQ ID NO: 18 - DNA, 451 bp, Homo sapiens
ttcatatttcaagtgtttttattctgagcagtaggtacaaaaaataatgacatagttgtgtctaattctgtatagttcagcaccctccacaggctgtcaatctctgatttgatctacttttaccagatttaacagatccttgaatttactttactgtatatacttccttcttgctcacattgggaatcaaactaatgctggaaacatgcatcttcagacttcattgaggaattccagattgagacacgctgggatgtggattgagtccatggttagagaagatggattaaatggaaacaaaacaggaaacatgtgcttggcatctaatagcagttgctgagggtcattccgctcttgtagttgtgcctggattgttcgtataaaggccactgttacccgttcttcaaattcattcaggggagtataaaggtttaaaattttgacaatctgc

SEQ ID NO: 19 - DNA, 456 bp, Homo sapiens
ttttgggccacactgagtgaattttaatgcaggatggaagcacacagatgggtgatcaggtctctctttactgaaacacagaacatgtgccaaggtgagtccaaggacacctctgggaacaggtgaagcccctccccacacatacactccggtggatgtgagcgagggtcctgttgccacatctggggtcaggggcttggacatgctgcccttcatgggaaccttctgggtacctctcagcacagtaacgcagctgcagtctgtcggtgggggcccaggctaggggcagcaccctcttttggcatacgggacatgcctggctgcagctgatgtccgttagcctctcctgacacgcagtaaggagacctggaagtgaggcgcgtgggcgtggagttcccggtggagcttgctgcatcagcctttcttgccactctggggtcagtgaagtctttcccg

SEQ ID NO: 20 - DNA, 436 bp, Homo sapiens
tactttagtgttgatcagtttattagtatttttccaaacctgaagaatggtgaaagtttgtggtacagtgtggggaaaacagtaagtgtggctttgggcaagccacttcccttctatggctctcagttttcccatctgcacaatgagggggttggagtgtgtggtctctaaggcactgaatttcagtctgttctccatccatcagtggatatgtgagatgcaatgcaggggtgctggcctgtccctggtaatgagcgaggatatgagcaaagcagtgagtacagcctggaattccagctactcaggaggctgaggtacgagaatcactttgaacttgggaggctgaggtttcagtgagctgagatctggccactgcactccagcctgggcgacagagtgagactctgtctcaaaaaaaggattctacgactatgat

SEQ ID NO: 21 - DNA, 421 bp, Homo sapiens
ctcacatctttttaatcattcatattgacttaatcaggttgacaaaatctcagggttggtctgggatcattcacaaatcagaattactcagagaaattttcacagcagttgcagcagcacaaactctaacgctgatttaaattaataactgttattaatgaacaaacttgaaaaaggaatttcatatagaacattacatttctccctgacactaccgtatcataaaaattaaaaatgatataaacatgttttaaagtcatagtggtagaaccagccacactacagtgcggcattgttagaagttcgctctcaagttgactcagcttagtaaagcaaattgttctctgagatttcagctttggttagtcctctttggctgacatgaacattatggagtgttaactggtggtagcaacacata

SEQ ID NO: 22 - DNA, 466 bp, Homo sapiens
  misc_feature (1)...(466): n=a,t,g or c
gagcacaaaggtccactttacttacatgaaggaacataaaggcatgagaaacagtcatctcaataaatgcaagacatgagcataaaagaggttctctgcctttccagcgttgttattacagagagaaacctacaattattttgttaaacaaaattcaaggctccaggactcatctctggagctgatatgtcttaaatactattatagtaggaaagggagaggagaaaattccccacccactcccccgatttggcccgtgtagcttccctttgagggtgtgtgacttgccatctgcaaaagtcatggccaaaacaggaactaacaggccaaactaccatcaatctagtcttctacagcaccctaacagagtgccagggtcctctgtcncctccgcacctgaggncaaagttccaggaagtttactgccggtgttaggaggtgagctcaagttcagtgtctgncttct

SEQ ID NO: 23 - DNA, 449 bp, Homo sapiens
  misc_feature (1)...(449): n=a,t,g or c
taaaaataatactccatgcattgtgggtgggcttcccctccgcagccccagcccaaggcagctgggcctagctgtcctcccccctcctctgattcatggaatgaaacttgttcatgagttcttccagctccgacccactttgctgcttctccaggaaggccttctgcatggtgagctggctgtacacgcggacncctcctcgccgcacactttcttcagctcctccttgttgagggagaagagctgcggcccggtcaagatgcccaggttctccacgatccgcgggctgaaggctttggcttccagcaaggcgcggacctcgtcggaacccgactcgtaggtgagcggctggctcacgggctggctgcgctccacgcggaagtgcctctgtggctgcgcctgatgttgctgattttccggatgagctcgtcgttgaactcgtccaatgt

SEQ ID NO: 24 - DNA, 552 bp, Homo sapiens
  misc_feature (1)...(552): n=a,t,g or c
tttttttttttttttttaaagttaaagattcttttattaataaattctccctcccctccaaactctccccaaaataaatatctcctccccgctttggggagttgggggggtctgtatcttagggccagccctcctagtgggccagcnccctagtgttaaaaataggtccctaaccccccagggtgacccccgtggtggaatttcaggacatctgagtgagtggggcctagtgtcaagtctgccccccaagtcagcctggcccccaggntcctaaggaaggagggcacccccctcccctgtgcaaatgctgcagttccttagtcagtgtcagctgttttgtgtgagccagcgtgaggctccctttctgttctggagccagaggagnggcaaccagacancttggaaggttcccctgaaccctgggcccaggctncggaggtgattcacgccccnaaaccccttgtggttggaggagcttggctccggccgcgtctgggaggcagagaantgggctctagaatggatgaatgaatgatgaatgggcnagcccgg

SEQ ID NO: 25 - DNA, 400 bp, Homo sapiens
  misc_feature (1)...(400): n=a,t,g or c
gtattataaatctgctttatttagcantttctnntagcgaagagcacagaaatcancncngnnnnncaggctttgtacatcataggactagtcacttgtgctttcatggatactgcctgggtgggggttcacaacacttataagttagagagtttgagagccagtggaaagtaagtggaagttgttctgaaataagcccctgnaattttctgcaatgaaaaggagcagaggtcattttcttataatgctcagcctcagagatagaacactggaggcaagaaattaataatttagtancaangtggaaggctccagtggngattacatcatgatgtaaaatcagaggttgatctggatgngttgagcaaatgggtgctcagatgggtattagaganagaga

SEQ ID NO: 26 - DNA, 438 bp, Homo sapiens
  misc_feature (1)...(438): n=a,t,g or c
ttttcaagtagangtatttttatttnaaggcaccntaaaatgntgatntctctaagaaatacctntccttccgtgtgtgaaaatccttgggggaaaaaaaatcccacacggtgttcttggccatcaggatcatgaaaacaaactttggtgaatgtgagcaactgcgccagacaggacacaggttacagggcctgacgtcactaacggtaactgacaatcttggaatggaccctactgctgatgtttcaaaaggacacagaggtgaactggtcacttctaattaagaagagccagtggggtgggggaagctgaaaaccaaaaatccacgtagacatacgtggcagtngtgaacgtctgtcctccccttccttctcctcacttcctctcctcctcctcactcaggntgggtattctccngggtgtgcggatgtcagctgc

SEQ ID NO: 27 - DNA, 565 bp, Homo sapiens
  misc_feature (1)...(565): n=a,t,g or c
ttttttttttttttttaataaaaatctttatttttttattaaaaaagaagtactttggtagctatttaaataagnngggggtgggaatgaatgtcgagatacgagcacctgcatcttttagtcaattgtcagtggagtcggtggggtgctaagtgttctgaactgaagtaggtgcactaaggttccaagctccctgcaaggatctggacgggaggaaagcagaggccctgaagggaaaaaagcctgcttcccaatacttattttttattactgtacaaaaagcacactctccctctttttgtctctcccaccaacggcacccccccacccccaacccaagaggactatacatggagtgcagggacagagttgaccaggaggcctttgtccggcaccctgcccacaggctgagctcagccccaggccctttcaggcatctagacactcccatagcctggtcangctggggcaagggagatnccaggtcacacatacttccctggaagagttggacttaggggtaagagccgggtgcacggtanccagncttgctctcattcccang

SEQ ID NO: 28 - DNA, 371 bp, Homo sapiens
  misc_feature (1)...(371): n=a,t,g or c
tttttcattccagttattttaatgttatttactagcagtgtgccctcgtgcacattatcaaactcctctgactcttggaatcctcatttttcaataataactcacaaagctgtcaancctaagggttctaacagctcgaacagcacctggaacagaagcaatagccgccactcagaggttacttcttccttctccgccttctctggatcacctccctacctcatcctcaatctaacgctggaaatattggatatggggtaggtcaccaaatgttgccagaagactcaaattatgccacccatatctcagctgggaagggcttaccgtggcctgactctccttcagggtccaaagtccccatttaatgaatg

SEQ ID NO: 29 - DNA, 459 bp, Homo sapiens
  misc_feature (1)...(459): n=a,t,g or c
ttaacgttttccttccccgcatttatttaattttcccatggtggttaacagtaaatccctaaaagactgatttagttcattcatttattccagcaacaaatatttgagaacacactgtgtcccagacactgttctaaggactggcagcgaagtccaagacaaacagtccctaccttcagcaagtttgcagtcaagcaggatnggaatnctgagcattacaagggaaatgattattctgagagaggaagtatggggtgctatgggaacatacaaccagggacctaattttatgggaaagggaccagcccagatccaacacttgctctcccagtttacctccagtaggttctttttaacttgaactaatcttgtttggtggggtacacagtgaggaaaaagaagagctagtgaccaaatctaactcccttctcagtcttaagccaggtgaaggcaagggag

SEQ ID NO: 30 - DNA, 424 bp, Homo sapiens
ggcagctcactccaggtttatttcagggcagtttgggggtgggggacaaagacccccctccagctcctaaactgggtcacttttctcccaggtgaaggggaccatcctcatgggatcctatcgatgtgagagctttgtgtccaccaggtgtggctgggtgcaccaaggtgaagggtttgagggctgcacagggacccccagcactgggagtttggcctcctccctcagactggatggtttcccagggttggaaaggggcaggtctcccctctcagcttgggacttctcagagggaggagctgagtgtctcctccctcagacccgcagcccctcaaggtgctgcgatctgtgccaccctctttgaccggtccctctgccctcagactagcggaacaaaattacacctgaaagtggaggagcgggt

SEQ ID NO: 31 - DNA, 432 bp, Homo sapiens
acattgtaacaggtttatgcattttgaagtgccttctacacatccacccagaggctctgctgatttcacttatgcccaggctataaaatgcctttctctcatcccccagtagagcactgggatcaccactaggcctagggggcatatcaagggtttaatagactgggggaatgggcaacagaactggctaccttagaggctctggaatgccccccacccatccacccaccaatggaaggaaagtcaggcatcgctaaaaggagtggtccctatctagccccaagtctggagcagaaagggcaggtccattctggcccaagtgacattgttaagatcctgtcccctcccccaatcactgctgcttgccagggtgcctcttcacagttcccatgtggcagcagtagtggcagaggcagaagtggacttattgta

SEQ ID NO: 32 - DNA, 398 bp, Homo sapiens
  misc_feature (1)...(398): n=a,t,g or c
tttttactcttatgttatgaatatttatttttttctccttaaaaatgtacaaaaaataaaataactgtatttatagtttatagattccccctctcccatttacaaaactattaagttacatttaccttttttttttaaaacatgagagcaaattgtacatatatcaatctcccttgcttgtctttaagaaagggccgttcatagcatttggcacaaaccctctatttctgttgcatttgcatgattttaaataagaaggaaaataaacatttgatttatttcatgcttcctaagtttctgggcagggacatgcctnactcttttaggaaaccaattccaagatgacatcnggactgcatttttctgttggtccgaactttctaaacaaacactcataa

SEQ ID NO: 33 - DNA, 371 bp, Homo sapiens
  misc_feature (1)...(371): n=a,t,g or c
tcagccaatcacaaaaaacagactttattgaagtatttagcactaaaccccacacaattccagctctgtagctgaggacacagccacttggcaatggcaccaggtgttatacaagaccaataagttaatgtaaaggacgcttaggtgtggagggccagtgctcagccgtctcctggctcagaacaaggcactctgggctccagttaggacactgagaggccagggaaaccaacatgccctggagaaaggggcttagagacaaaccggaaaagcacagcatccaagcagggtattcacgcatggggggcagagtaggcccaaaagttgggggttgcctgatgcggtaagagcacagttgagagnaattncca

SEQ ID NO: 34 - DNA, 214 bp, Homo sapiens
agtgttgaggattttttattgtgttttccacatagataaaaaaataaggctttttgatgaaaagaatccattacaaagtcaaaaatccattacaattataattgaatcagtaacaaaatttagctttaaatgagtcaagtattctgcatttgaaatttaatatcacaaacattcaagattagtgaattttggtaagaaaaaaatactggggggg

SEQ ID NO: 35 - DNA, 374 bp, Homo sapiens
  misc_feature (1)...(374): n=a,t,g or c
ttaagacaaacataacctttattctctctcaaaaacccagagaacagggcctggaaccatattcgttaatttaaccagaatcagaatactttaactttcatagtctcatttaaaattttatagcaatatactgaccattctaaaaataacaaaatacatgttgctctcaactacatagttaaaaaaggtagtaaattctcttacccaaaatagaggaggggtgggctagtgagctgctcaaacatttgtaacaaataaaaatgtatctatatacatataatgatcatgttttcatagcctaaaatcaccattaacaaaatctaataataaaattgtgtcgtgttcaggagttgggaagccaacacattaaattn

SEQ ID NO: 36 - DNA, 436 bp, Homo sapiens
  misc_feature (1)...(436): n=a,t,g or c
ctggctgaagcatccccttggagtgccatgtataagttgggctattagagttcatggaacatagaacaaccatgaatgagtggcatgatccgtgcttaatgatcaagtgttacttatctaataatcctctagaaagaaccctgttagatcttggtttgtgataaaaatataaagacagaagacatgaggaaaaacaaaaggtttgaggaaatcaggcatatgactttatacttaacatcagatcttttctataatatcctactactttggttttcctagctccataccacacacctaaacctgtattatgaattacatattacaaagtcataaatgtgccatatggatataccagtacattcctaagttggaatccgtttacctcctgcctagaattttaggtgtgagattttttggttcccaggtatagcaggcn

SEQ ID NO: 37 - DNA, 444 bp, Homo sapiens
  misc_feature (1)...(444): n=a,t,g or c
tgaacaataatatctttaatataactgtttttgtgtgcatagaaatcatataagtaaataaaaaaaaacaacaacatgagattacataggtggttataatacaaaagtgagaaaaaagctagtgtctgagtattgcatcctggatataattccctgatatatggtaaagcataaaagagacctatttcttcaggagagtagctgacccacctcagggccatgactgctcttctctttccccacagccttagtactttttgccaaaaggcccagatttgagtaaaggggaacgccgtgagcgtaaggatccgggcataagggctgcagtctgttgagctttggcaggttggtgttcggggaagtaaatttcngaaggaatgggttcctnccctgntgggttgttggtttggttgctgattttccnggttgggtaccaaggcgcta

SEQ ID NO: 38 - DNA, 476 bp, Homo sapiens
tttttttcaacttctctaaatctttttttgctaggtctataatttcaatggtttctttgtctgaggatagtatggtaggagaaaaagttgatgatccgctgaaatatggcgctcttgctgtggctcttgtcaagttttttcgaaggttctcattcactgcttcactttctaataattttgccctgagatcttcgatttcttttatataactatgaatcatattactaatctcctcatttccttcacctgctctggcaagaacatggttggcctgatcactaacaagctgtgtaattctggacctcaatgcatcaaccgtctcttgcatggctttaattcttacacgcaggttattattttcagtctgtagcatagcattctcatgaaacatgtcattgatgctttccacaccctcttcgtcaattattcttttacctggttttgtactccatgagctccatctgaagtcgtgtgag

SEQ ID NO: 39 - DNA, 75 bp, Homo sapiens
tcagaagccacttatacagagcctccttctcacaattctcatcacacacacactctgcaaagcttgtgcagggct

SEQ ID NO: 40 - DNA, 701 bp, Homo sapiens
  misc_feature (1)...(701): n=a,t,g or c
taagagtgttcaatccgagatgaatcatttgaagtatttttatatgtatatctatttaaaactaatatattattaaagcttaattgccatgccgtttatcttctctgaaagaacttcaaatcttacctgccaacatattcaccataattattttttaatacctttcatacaataacttttttaaaaaaacctcagattgaaaaagcaacctaaattactttcgctctctaatcagcatttcaatgtatttatttttaaatgttctcaaaaagtaactaaaaaattgtgtcggaccctacttttgagaaatctacgtttcccaagttttatgggaactggctattccttgtcccggcacaccttctcattccttcctttcagagcctaaaacctcatttgataagcactcctagtctctggcctgtggatccagtgctattctggtcaccaacctaagaatcccaattgcacccttctggtttctgacagtcacaggtgacagctgtgattctataatacagactggtgtcttagaaggtaggaataatacatgatttatggaagcatcaccctggntaatacataataatgtctttttatatanaaggggatgagttagttcctttaatacantggacagaaaaaatgaaaaggtggactttgtaatacctttaanccataaaanttaattaccccanaga

SEQ ID NO: 41 - DNA, 339 bp, Homo sapiens
cttggatcaacagcccgccagctgattgactgtttaggaatgactgaaagaaaccaaaacagcctgtccactgctgctgtgggatggaggaggcgtaagcagaaacattaacagtatattgacctcttagcagaaccgcttccattctggagatcacggctgctaaatccagcatccccacttcattttacccccagcatattgttctgtagtcttttcttgaaacatcttgattgcttttcctcggcagctttcaaaaaccaaataataatagttatccgtcttctacttcatgggagattgttttggtgccctcaccctctgaaggtgcccagttcc

SEQ ID NO: 42 - DNA, 457 bp, Homo sapiens
  misc_feature (1)...(457): n=a,t,g or c
ngtcctttctatgtcagcattcagagttactggctgtcatttttcatggtgatgattttatttgtagctttcataacctgttgggaagaagttactactttggtacaggctatcaggataacttcctatatgaatgaaactatcttatattttcctttttcatcccactccagttatactgtgagatctaaaaaaatattcttatccaagctcattgtctgttttctcagtacctggttaccatttgtactacttcaggtaatcattgttttacttaaagttcagattccagcatatattgagatgaatattccctggttatactttgtcaatagttttctcattgctacagtgtattggtttaattgtcacaagcttaatttaaaagacattggattacctttggatccatttgtcaactggaagtgctgcttcattccacttacaattcctaatc

SEQ ID NO: 43 - DNA, 404 bp, Homo sapiens
agacagagtctcactctgtcacccaggctgaagtgcagtggcactatcttggctcactgcaagctccgcctcctgggttcacactattctcctgcctcagcctcccgagtagctgggaccacaggcgcctgccaccacgcccagctaattttttgtatttttagtagagatggggtttcaccgtgttagccaggatggtctcgatctcctgacctcgtgatccgcccgcctcggtctctcaaagtgctgggattacaggcgtgacgaccgcgcccagccagcttctccaagttttaaaggattaaagccctcaaactctcaggcttaaatcaattcctaatgtgggatatgttctccaagtatgcctaccaaagccatacaagaataaagtgagcagcagcagc

SEQ ID NO: 44 - DNA, 476 bp, Homo sapiens
caaacctcctcctttcaaatcaggaagtatacataaagtgcaagtaaggttcattccctcgctgtgctcctaggctcttctcttgatagtattaccgaatctatcaggtaaaccgctggccgagtaggatgtctgcaggaatttctggagttagcaaataacttcatctggcaaagagagtatctgaagatcaacacagtcttggcaagaaaacatgaagtaccacacacaagacagggatgtgaaggatgcaagaagtagcagggagattgttgtcactgaagaggccatctttggatctcaaagaatttaagagaattcaggaaccgttactaaaatgaacaaggccagcagatttcagagcacggtcagtcttcagtgagggcagattcagttttcctagttaaattcctgaatttctttttggcttctgccctttcttcagcatcaaagtaccagacagtcatagcatatct

SEQ ID NO: 45 - DNA, 388 bp, Homo sapiens
ccgaggcttcagttctgtaccatttaatgcgtgcaaaggacattccatggtgtctgctgggttcagggcaactggctttcccaaggcatacaagaaaagttggcagaaagtcctcccctttaaaattcaagcctgaaggttttgtgtgggggcctactgcccctaatgtcttctggtgatactgcagcacagtccatcaaaatagtttgtggttttgccatctgttactccttatgcccacctggagaggggctagcatctttaggtgggaccacccctggcacaacatggtctctgaggtccagatactctgagggtaggggctggctctctctgcctccctatcccctacaagagggacagggagaggtagaacattgggatcttt

SEQ ID NO: 46 - DNA, 447 bp, Homo sapiens
aaatcattcagtttaaggtcactagactttagatgagtgaccctgcaggtttataaggcattctgctcagcagtcttgtaaatagtcctatatgaaagagccatgctactgttggacttggtcccactctggtcaaccttgataacgtcatacgtggcttatggactggatagcactggattccgccgcagccctggccatactgtgccacacgttggaagaactgtgggatgtagaatggagggactccttgtcagacagtgacagcatcatagcatatgcctgcgatttggactttctgtgtaacggctgcttaagttcctctggcacatgggaagtactaaaagaagacagctcagcttcagaatattgattatcttccattttcctcattttgagggctatctgtgaagtgccttatatgatctagagcagaaagtccacttt

SEQ ID NO: 47 - DNA, 335 bp, Homo sapiens
acagaaaatatagccatgattgaaatcaaatagtaaaggctgttctggctttttatcttcttagctcatcttaaataagtagtacactttggatgcagttcgttctgaagtgctaatcagttgtaacaatagcacaaatcgaacttaggatttgtttcttctcttctgtgtttcgatttttgatcaattctttaattttgtaagcctataatacagtttctattctttgagataaaaattaaatgatcactgatattttagtcattcttgcttctcatctaaatatttccatattctgtattaggagaaaattaccctcccagcaccagtcttcc

SEQ ID NO: 48 - DNA, 377 bp, Homo sapiens
aactcatgtaaagctcattgtaatagatgtagtttttctaatctacatttttattgactgtcatctatcaaaatattgacttaaatcctgtaactatttgatttcaagctttaaattgatctggtattccttgcggggctccagttgcatctaaatagatgtgagagttgaaagacctataaggagcttctctcgctttatgatgtcttattttttttttttcctctggttgatgaaatgccagggtaaaagggatagccaaatggactaaagcacaagtgccactctagttattcagcagagtgcccagtaaaggtccaccacaataccaccatacatccactcggggatgaacagaggctgactgattgataagc

SEQ ID NO: 49 - DNA, 278 bp, Homo sapiens
cactggaagcctgaggggctgttgctgagcctcagccccagaaatacaaaaagtctttatttcacagaaattagggccatttccatagttatggggaaggacgtgtgagcaggatgggaggtgctcagctgactgtcctctccagaaggctcttctgagctgagcaggagaccccagggccacagccgagccccaacctagacacggtctgagctccaaccttggctggctatacttcaagggcgggtagggccggcatggggctggagggagtcagc

SEQ ID NO: 50 - DNA, 433 bp, Homo sapiens
cttttgttgtggctgctgttctattgatggcaggtaatcatcactcttcactagctgagcattcggtccactaacctgagtcatatccggcactggtttctctagaaagggctccgacggggaatgctgatgcacaggcactttctgcggggtgttctggggtgatgggtggagctgtcccaaggctggtgatgagggtgtggaggtgaagactggtggtgcaagcccgggtgaggctgcagtggaggacaggttggcaactgctgaaaagatggctgttgaccaggatgttgttggccaggtatcagtcgttcctggattgcttgtgggtctccaaggccaacaccaggacaaccatttggcctcatgtgcccagtcaattcccttggtgccgaggacatgcctataaatggacgagactgctgcatgtttc

SEQ ID NO: 51 - DNA, 375 bp, Homo sapiens
taaatacaggagtcttttaattccttgtaaggaaaatttcctggataattccatgtattttaataatcacagagatagtcctatccttattcattatcaaaaatactgtggtaacaatttatagatgcacacaatctcatctattttgacataaaaaaggcagaaaggcaaaatacaaattctgagacagagagtaaaacaatacgacatccttaggtttatttattttattgtttgtttcactgtttgaatgtttatcttgcgagagtctacagaattgagagaaaatatctgcaggctaattttacataacatgaggcaaagattaagcactaaatataaaaaataaaacttttagcttgcttattaaactag

SEQ ID NO: 52 - DNA, 363 bp, Homo sapiens
tttttaattgcaactggacttttattgtgcagttacaacaacaaatgttttcagaaaaatatttggaaaaaatataccacttcatagctaagtcttacagagaagaggatttgctaataaaacttaagttttgaaaattaagatgcaggtagtgcttctgaactaatgcccacagctccaaggaagacatgtcctatttagttattcaaatacaagttgagggcattgtgattaagcaaacaatatatttgttagaactttgtttttaaattactgttccttgacattacttataaagagtctctaactttcgatttctaaaactatgtaatacaaaagtatagtttccccatttgataaaag

SEQ ID NO: 53 - DNA, 453 bp, Homo sapiens
gaattttcaattttacatttaattataagaccacaataaaaagttgaacatgcgcatatctatgcatttcacagaagattagtaaaactgatggcaacttcagaattatttcatgaagggtacaaacagtctttaccacaattttcccatggtcttatccttcaaaataaaattccacacactatcaaactaaatcaagatttgctagtggataaaattaccataaatataccgtactctctctgaaacagctacaaacatcttgtttttgcaaaatatacaatgtttctcaatctttctgtccttatctcaatttgcaaaaatattttgaaacaatctcctttaaatgttattcttgttaatgagggcaaatcttttaaaatccacatgctagatcttgaaaacgcttgagaagaaaataaactgtgaaaggagtggttatttaaatacttc

SEQ ID NO: 54 - DNA, 423 bp, Homo sapiens
acattcagatgtttttactgcttgattacatttcttggtttcacatttaagacttcaatttataagaagtaaattatatgtttttcaatttaagaacagatgaatgcaggaacattatgaacattatgttggggaaaacaaagagaccccaaattaaaaaacaaaacaaatcaaaacataactagttgtgcagctctggagaacttaataaaaagtaaatcaacttttaaatcagttaactttggcgtctgaatacaaaatgtttatcagtattacctatgtagatgactattaagggatgtgcagcattttcaaaatccctgtgtgtcctttgtatgcatgtttggtacactgagttctgtggtcactgtcctctcttcagcagggtttttttaccccagtacgattgtccatctctgtatt

SEQ ID NO: 55 - DNA, 391 bp, Homo sapiens
ttttttggctcaacagagacaggtttattttgggaataaacctgagaggggcttctggccgatttcggtcagggacattctcttacagactaagggcatttaagggtttaggaagggggagcctaccgcaggctgcgaagtgtttctgtgtgaaggagagttttattgcagagttggaatatctctggctggaggggaggttattctcaggattggcatgtttctggtcagatgggggtttatctcatggttgaaatgtttctgctcatactgacatgagccattaggctgatgttttgggctggtttttaatcacggagaacttaaaatggccatgtttgtccaagatggcaatgctcctgctgtcacacccacccacccacagggtact

SEQ ID NO: 56 - DNA, 412 bp, Homo sapiens
tttttttttttttttttttttccaatcacctttctggttttaatggtactttttggccacggaggtccattaggtagagaccattaggtaaagagactcaagagtgtggagtggagtgtggggggttgtgggaggaggtggaaatagttgcaaaaatatctctctgtacacaaaacttagatgtcatagtggattttcccagaacatagcattcacattattgaaaacagcaagattcacttttcctaaaacacaaagccaagaacataaaaataaatatggacattctagagtcctgaaggcctagagaacacatccatagtctggactttagagcagcttagaggcagaagttctgagtcactgaggtccaaggtggagtccagaggaggctgggcccttgagatgaagt

SEQ ID NO: 57 - DNA, 165 bp, Homo sapiens
ctcgtgcaagtggtttattgatggagtgctcttaggagaaggggagtgagggaagcagcgtaggacagaggaaaaaaactgagtaagaatgtgctctcagaagaagactgacttcagcttgattccatgaggagctctgggaaaggaagttccttgatgtaagag

SEQ ID NO: 58 - DNA, 409 bp, Homo sapiens
ttttttttcagaactgcagagtaaatttattgggtggttgtcggttaaaatgacaaatgatgatctgaattcaatacattaaattgctgatagaattgcaaatttcaactgaatttacattgaggcctagcagtggtagttggctacaactggaacagtttatcacctcagggtatttgagggcaaggaagatacagaaaaaaaaaaattaggggtatgcaacacaatttaagtgctcagaaataaattttaccacagtgagaacgaaaccacaatgacatgttactaacactgtgcagacgtcatggttgaatgcctgcgttctgttccttcctggtggcagccgccttggttcattagttctcatgtttgcagctccttcacatgccccggagcttcccaagtgtgc

SEQ ID NO: 59 - DNA, 330 bp, Homo sapiens
gggtgtggaaacatgtgagtgtattatttatttttgaataaataatacaataaaatataaaacatacacttattgtggccctctgcacaagcaatctggttgtgcagagtcttggtgtcccctgctagtcttagtacctgtatagagctcttcagactgggtgtcgtgttgcagaggctagcaccattcctgatgtcaccctgggtgagacgtggtcctcagaatccagatttccttttttgtctttttccttcttccacatgttctaagaaaacatagatttctggccaggcatggtggctcacgcctgtaatcccagtactttgggag

SEQ ID NO: 60 - DNA, 162 bp, Homo sapiens
gaggttgtctgtttattggtgaggaaactcctcgagagttaatacagtgtaatcttttcccagaggtgtgtagagggaagggggcctagaggcatcccagagatagcttatagcaacagtgctttgaccaagagctgctgggcacatttcctgcagaaaagc

SEQ ID NO: 61 - DNA, 377 bp, Homo sapiens
  misc_feature (1)...(377): n=a,t,g or c
gagattaaacaggcaagttttattatcaaatgttaactctacaaaaactcagtagtattgtagtaagcattactgcctatcttaaagtctttcagagctttgggcagctttgggcatcttaaggcatcaagtatacagaaatttcttttcgatcttaagtgccagttatcaccaattttcacacaaacctttttttttttcttcctattgcagttaaagggccattgccagtcagctgaagaaggaaatgtttgcttctccctttaaggtgttaaagtaatgcacagaaaataaaaatagcagcctcataaatctgcacggcattgcattcaagcaaagggncaatatgagtaacttaggggaaatatccacattca

SEQ ID NO: 62 - DNA, 491 bp, Homo sapiens
gacagcagccgcctcgccatgaagctgctgatggtcctcatgattgcggccctcctcctgcactgctatgcagattctggctgcaaactcctggaggacatggttgaaaagaccatcaattccgacatatctatacctgaatacaaagagcttcttcaagagttcatagacagtgatgccgctgcagaggctatggggaaattcaagcagtgtttcctcaaccagtcacatagaactctgaaaaactttggactgatgatgcatacagtgtacgacagcatttggtgtaatatgaagagtaattaactttacccaaggcgtttggctcagagggctacagactatggccagaactcatctgttgattgctagaaaccacttttctttcttgtgttgtctttttatgtggaactgctagacaactgttgaaacctcaaattcatttccatttcaataaactaactgcaaatcactagaaaaaaaaaaaaaag

SEQ ID NO: 63 - DNA, 305 bp, Homo sapiens
ttttttttttttttactttacgcatttttaataacaatggtacccaattcattaacaaatgaatttaggcaatgtgctttgctctacaatccatcagatacattttcactgcagatagttcagaaatcattttggaaatagacacaaacatgtacatattcatttgctgaaaatgccacttacagctttaatatcaaatatagttatcatagttcacagaaaaagtataaagtgcaaaagctccacttcaaaaggccttaagtcactcccaaagcaatgaggattaaattttaccacagccagtg

SEQ ID NO: 64 - DNA, 457 bp, Homo sapiens
ccagtcgggttggagtttatttctgccagagcctggaggctgggagggtaaaggacactcctttagtcccagagggaagctccgaaccctcagagcaaccagaagggagggcagagcatgggcagcagcaggagtgagaggggtccccttgtcctgcccctttgcaagggttcaaggctggtggaggcctggggcttctgtcgctcaggagttcaggggtggacgcagaaatgggggaaggagagtggctacgtagagagtgagagcgagattcctaaaaagatgcacagagagaccctcagagagaagcagagggaatgggttgcactggctgaggatggtggaggagccgtctcactcccttcctaatgtctatagatcaataacgagggaagaaaggaggacagggagctgatggaaacacagcttgccaactgtacccagtcccccaacaagc

SEQ ID NO: 65 - DNA, 391 bp, Homo sapiens
aattcggaacgaggcgaaacgtggatgtctacacgaaagtctgcaaatatgtggactggatccaggagacgatgaagaacaattagactggacccacccaccacagcccatcaccctccatttccacttggtgtttggttcctgttcactctgttaataagaaaccctaagccaagaccctctacgaacattctttgggcctcctggactacaggagatgctgtcacttaataatcaacctggggttcgaaatcagtgagacctggattcaaattctgccttgaaatattgtgactctgggaatgacaacacctggtttgttctctgttgtatccccagccccaaagacagctcctggccatatatcaaggtttcaataaatatttgctaa

SEQ ID NO: 66 - DNA, 477 bp, Homo sapiens
ccaggctggtctctgtggtttttattagtgtttcctgggacccatcaaacaaataaacatattttgaaaaatataattctttgacaaaacaggaatagcaggaatagtttgaatttaacatagcttagagggaaagatttctgattttttttaaatagtagcaatagagttgtttccacaaattgtcaacccaggagccagatggaaagaaaaacaagaattatgcagataactacagaaagattaatcccaatttagttaaacttgtgaaggcttgtacgtttcagaggttcataagacacagtctcaacaggagttttttttaataaatgctctatctctagttccagaaactgaattccaagaagctacactgaggataattcagctctgatattgtgattactgtgatgttctttcattcatacagtaagtatctgcccaatacgtaactaccgagatctattgcttcctaca

SEQ ID NO: 67 - DNA, 267 bp, Homo sapiens
ttttttttttttttttgttacacagctctttaataatagtggccatagctgtaataacaatgacaacagtaggtaacggtagtcataccaacagtagggcagtgcattttatattacaactggtttcttgctctagtaggcttggggatgggtgaagacggacagggctggcgcagaccctttccttctcctctccagcccacagtgatctgggcttttacaagacagcctgcttccattcagtagtgtgggaaagttccttcttgg

SEQ ID NO: 68 - DNA, 452 bp, Homo sapiens
ttttttttttttttttttttgcccctttatgtatttatttatcaaaacactcgcaaacctgacctcactcaccaacacacacacacacaaccaggacacatgtgccaggccttatgaaaggctatcaagtactttgaaggacaggaaggaatgaacacacccaggtggacgtttggtttcatttgcaggggttcagggagggttgcaggggttcagggagggctcttgtcccacaaccggggaagggagagggcagagcaaggcaataaatagaaccctgggcccagcctgctttggtacattgtgggtgcatccctgcatgtggccttggcagcatctgctcccggcccttaaccatcagcaggagtcaggagggtggggcccaggcagctggtgcaggcaggccagatgtgcagcccaaggtccctccaaatagccctggagccctgcag

SEQ ID NO: 69 - DNA, 471 bp, Homo sapiens
tttggtagcaaacttttatttaaatcttacataactcaagctttataaaaagccaacataattgaaaattgggttctccctctaaagccttaagtattcaaagctcaaaacagttaatttaaaaataagcaaacaaataaaacaaaaaaaccctgccagcagatcctgctgaaatactaaaaaaaaaaaaaaaaaaaaaaaaaacactaaatgagcttaatctttacaaaagttacgttagctcaaaagctataaaatcaaagttatcttaattctacaaagaagggagagggtcttcatgccaccatttccttagagcctcatctttttcatccaatttggccacaaatcaaatttctgtgtgcccctgttttcaagagattcctcttgcagaagaggccaagtataaacatggaagagtaactgcctaagtaggaaagtgttccataataatgtgcaaacaaggagttc

SEQ ID NO: 70 - DNA, 364 bp, Homo sapiens
ttgggcggcaggatgctggtttatttactgtaggatctccagggccatcaaagccccctcgtgggatagggagactatttacacagccagggaggagggcagccaggaggcagagaccgggtcccgtatttccctctgcccgaatgaggaggggaggggcgtcctgggtcctgcagctgtagtcttggggttcagatggaaacttcatactcccgcgtatccccagcttcatacagcgggttgctgaagtccgactccacggtgatggggctgtaggagtgggagcccgagaagccgaaaagggactttccctgaagcttggtgtagtagatgtaaacgccactgccgaggacaatgaccaagc

SEQ ID NO: 71 - DNA, 436 bp, Homo sapiens
ttttttttgagtgtaaagaaaggtttactccttgtatcatcccctccccgtggactgcttcaattctattggggacaggccagtccctggaggctgcaaggagccacaaacctttcccagctcacactctgcacccctcagtctctgctgctaaagaatcagactcaggtagatggggtgtccacagtctgtcctcattacccagtcataccgggtagcatggcccgagagagcccttatctctccccaccttaaaaccctcagcatcacacagcaggaaccagtccacagggcttaccaaggatacgcagtgaaaacagaataatgtctgttacaaaccccctaaacctgagatggctgaagagcagattcctgcaccccatctgactcccccaggcagtgggagatgacccaaagcccccattccctgggcaga

SEQ ID NO: 72 - DNA, 96 bp, Homo sapiens
ttttttgcaatgaaaaccctttaatgttgggctttctttaaataaaacagagaggttgcagctttcccatggtggctgtaaggcaagaacagcagt

SEQ ID NO: 73 - DNA, 412 bp, Homo sapiens
tttttttttttggagaaaacagaacacccccaaaacatttattttttttttagaaaatcatggctcactatggtagtatacaatattgttttcacacatgtacacttgaaaccaaatttctaaaacttgtttttcttaaaaaatagttgttgtaacattaaaccataacctaatcagtgtgttcactatgcttccacactagccagtcttctcacacttcttctggtttcaagtctcaaggcctgacagacagaagggcttggagattttttttctttacaattcagtcttcagcaacttgagagctttcttcatgttgtcaagcaacagagctgtatctgcaggttcgtaagcatagagacgatttgaatatcttccagtgatatcggctctaactgtcagagatgggtca

SEQ ID NO: 74 - DNA, 245 bp, Homo sapiens
gaaacaaactttaattcccaagccggacccttaagtcacaaggaacgtcagatccggctcactccctgacagggtgaattggaaactggcccctacttggtctctaaccccttccactgggtctagtggggactctgacgccgaacaggggctgtagatcagtgagtgtgtatgtgtgtgtggaggggcagcaggggccgctttccacgtggttacataagcacgtgttggggttgggccggtgt

SEQ ID NO: 75 - DNA, 384 bp, Homo sapiens
ttttttttttttttgaaacaaagtttccctcttgttacccaggctggagtgcaatggcgcaatctcgtctcaggagaatatgcattttaacacgctcccctgatgatacttctgcccactaaagctgtaagtcctagcaatgcaagccttactgttaaactatttttgacttaaattgagtgccagtttcagaaaatcagttatttcattttaaactttattcccagtaggaaatatgagacatttacagatggtgcctgacttacaatggttcagtttaggattttgcaacttcaagatggtcaaaggtgattcccattcagtagaaaccgtacttcgagtatccataaaccattctgtttttatgctttcagtacaatattc

SEQ ID NO: 76 - DNA, 305 bp, Homo sapiens
ccatgtggtcggtttctttattgagaccacagacggtagcgcaggtccctgctgtccacatgccccttgtagggacaggaggcccttcccgagtccaagtccgaatgccgggtccgggccgagcccacggccccgagtacaagtccgggttccgggtccgggccaagcccatggccccgagtccaagtccggatgccaggtccgggccgagccaacggccctactggctactactgggaggggctgcttttgctttttggtgaccagatcttggacaagcggaacttggacttcttcctctggag

SEQ ID NO: 77 - DNA, 240 bp, Homo sapiens
tactgctttcttgattttatttcaaaagtacacaaggtcacaaaactagagcaagttgtttttcttaacaaattttgttcttacaaatttcaaaatctgcaccattggatatataagccagaaatcgtacatacaaaatctgaaactgacactgtcagttctatactttgcacacgtgaagtgtcagaatattttcttcagtagtacaggtgtatttatcactaaaattcacaattaggg

SEQ ID NO: 78 - DNA, 257 bp, Homo sapiens
ttttttttttttttttttttttttttcagcaacctcggctgtatttattgatacaaggaagatcacccgagagtcagggacgtggcggcgaggggccctggaaatctccagataccaaagctggaagggcgtggagtcttctccagttctcctagtttacagatgttgtgacctaggcttacaatgggcctggggtctgaaagcgggacgtgggctgcgggggtcaaagagccggtttggtggaggtcagcgccaca

SEQ ID NO: 79 - DNA, 313 bp, Homo sapiens
ccagcagaggcggctcaggttgcccagctctgtggcctcaggactctctgcctcacccgcttcagcccagggcccctggagactgatcccctctgagtcctctgccccttccaaggacactaatgagcctgggagggtggcagggaggaggggacagcttcacccttggaagtcctggggttttcctcttccttctttgtggtttctgttttgtaatttaagaagagctattcatcactgtaattattattattttctacaataaatgggacctgtgtacaggaaaaagcgaaaaaaaaaaaaaaaaaaaacc

SEQ ID NO: 80 - DNA, 305 bp, Homo sapiens
tctccacaaaccacttttattacccagtgggtgggctgggctgtgatgttggagaaccttgggggtgggggctgcggaatgcagctgagcctctcctggctctgtctgctggtctaggccagggtggggctgatcaagggcagagagctcaatcttgggggaagaggaagagaggacagagaggccaaacaggctcttcccctcctcttcacccatgccacagcattaaataaacaaaaagcaactctttacagcacaaactacacagggaagtccttcctcccagccctgggcgcacagcatgg

SEQ ID NO: 81 - DNA, 424 bp, Homo sapiens
tttctttcttttctttcttttctttcttcctcttcttcttcttttttgcaaataatttacaggcatatgtaaaatacagtaagaatactgggtcatagtttcatccagtgaaactctgtgacaatccttcactagaaggagagtacttttttcacacagtcaggggatgaggatctgatccgaattacattttgtcgagtcactcattcccacagatttgagtttgaatgcagcttgtggggtacatcatcaggaacattgcacaattattttatgtcatttaaaagaatgatggaaaggaatgttaccggtgcttaaaggcctcagtaggcactcaataattttatagaatagttaaataaatattgcttacacataaaaactcatctcatttcaagatgagggggaaaaaggcatttgggaa

SEQ ID NO: 82 - DNA, 510 bp, Homo sapiens
tccagaaatgcttttccttttatttcagaagaaaggacataaaggcagacacttcccccgcccgctccccacccctcccagctcctgcctcacccagaactggagtgaaaggccagggccaggaccagggtcccataaagcttgcccttcccccaacccttccttccctcaaagtggcaaggttagaaaaaaattaactatgttgttcctccctggcactggataaaggccccactgcagccaaggagaaagaggggggtccaggctcccctcccaggcagagaagctgccgtggctggctagggggagggtggaggtaggttatgggacagagaggacaagaagtgccctgaacaccttttccctttaacctgacatatttatatatttacagttattagggagggaaggacatctggggtgacatcagttctgcaaaggcagggaataaaagccaaatagcacccccatctgggtcacattttcctgcctcctagcttctaaaacctt

SEQ ID NO: 83 - DNA, 427 bp, Homo sapiens
tttacattgtataatttaaaagctttatttccccccataatttgcaaatagatttcatattagttccactggaagttttcttcgtacagttgcctttctcattgactatgctgttggtggggaaaactgctttctcatgaggggaagggttagatttcatagagatgctctgagctaatcacataaacaagagggtttgacctggcagcctctgaggcagtcaaggaggtcaagaaatcctttcagctaaaggcctagtcaggtgggactagttgccaggatcctctctgcagaactgcccaaacgtagctctctttgaccaggaagcctggaagtcagaccatcttctcaggccctgccaaattcccatcctcagtcctgtggcctcatgcgggaacattttatccaagcaaaccactggctttcg

SEQ ID NO: 84 - DNA, 326 bp, Homo sapiens
  misc_feature (1)...(326): n=a,t,g or c
tttcaaagtataaattcatattttgtaggaaatgtagtttacaaaacagtatcaattgctacccccaattcagatgacccactttccccgggatgtgantgtttaggtcctattccactgggctggggaatccctctttcccacctttggggaacagggtggggagggggtaagtgggaccctgctgcctggagggctcaggtctgagcagcagggagccctcagcgcccactccagcagacctattgggaatttactacctgaagacaaattataggtctagggtcttctttgtgattttgggggagtcgaggcattggggggtg

SEQ ID NO: 85 - DNA, 442 bp, Homo sapiens
tttttttttttttttttttttttttttttttaaattgaaaggaaacttttattgagtcatgttttcaaagcaatctagtttttaaaaaagttgaagacaagacagaaaaaagaacatgacacctaagagaatcagacaggacagacagacgggagcaggggggcggggacagcggctccgtggaggtcagatcttctccatcttggagatgaggtcgtcgcagatcctggtcagctcctcgttctctttagtcttctgctccactgtcttctccagcgactggatgcgcatctgctccttcctcaggctggcctggagggcaacgcttccgcctgggccttgctccggacctgggcgatctcctcgtttgccagctgcagcttctcctccgcgtgggccttcagggcttggtacctctggccctcctgggtgatccttgcca

SEQ ID NO: 86 - DNA, 495 bp, Homo sapiens
tttttaatgtagaaaccacatttattaaccatggatttactgagggcagtttattaggtattatccatcgcttatgctgacatctgattttgcagagaaattatagccattattttattaagataattctacgagatcaatttagtttcttgaagtagcatatattcaattcttcaatagggtttggtttaatttagctatcaaagtcagatgtctctaaactttacacactaaactcatcgtgagcagaaaatttattctttgtacatattccttctgttttggttcttcaagctgaaacatctcaacttccagaaatatggttgccagatcaaaaataccagagtcctaaggggttaagatttgaatccagaaaaaggatacaggtaacacattgtattatatacaaactagcaacaacaaaaagtttcatcatgtaaacaaaagaatataaattatagacataattggaagtttcaaacagtccttaaatca

SEQ ID NO: 87 - DNA, 310 bp, Homo sapiens
ttttatcaaatgaatactttattagagacataacacgtataaaataaatttcttttcatcatggagttaccagattttaaaaccaaccaacactttctcatttttacagctaagacatgttaaattcttaaatgccataatttttgttcaactgctttgtcattcaactcacaagtctagaatgtgattaagctacaaatctaagtattcacagatgtgtcttaggcttggtttgtaacaatctagaagcaatctgtttacaaaagtgccaccaaagcattttaaagaaaccaatttaatgccaccaaac

SEQ ID NO: 88 - DNA, 410 bp, Homo sapiens
taaattctggacttctcagagcctttaatgttctaacaagcacagtgaatttccaagagacgatatagcacatgctacagtttccagacacatttggctaaggaacccttttctgagaataccctaataatatcccctgaaacaataatcttcagaacatgagaaataccagattagacttagaaggctctttctggctcccccattctaagattctaaataagattcaagtattagtctaggggtctcaactctccagggtgcttatactaacatctttttttttttttgagatgcagtttcactcttgttgcccagactgagtgaagtgcaatgacgcgatctcggctcactgcaacctccgcctcctgggttcaagtgattctcctggactcaagcaatcctcccac

SEQ ID NO: 89 - DNA, 427 bp, Homo sapiens
catttttatcagtattgtgaataaacttgaacacaaatacacgagttccatgtcatgtcttcagttgtagaagtttttcctctttaaggtaaagcgaccaacttgaactttctctggcaacacgattcgcagttatataagggaatcagtgttcacgtctctgtatatatttatttatgtgtaatttaatgggaattgtaaatatggtgagtctgttttaagccttttttttttttatttatctgatcttgtttacctcttgtttagtgggttttgaatcttccctattagttcttcatgtggttcatggtactgatttagaaatccagtgtttgggggatttttttctctgggattcatgaatttagccctgttgtagcatggtaaaggtgacaaacagctggacaaatttttaaaaagtaaaata

SEQ ID NO: 90 - DNA, 253 bp, Homo sapiens
taactcccagtcaccctgttttatttcaaccatggagaaaagtacagaggaaaggctgcatatggagagactgtcgggctgacggtgtcacagcagatccgagtccacgtgtggaaacagcagccgcccggccctgggtgtttcctccaggaaaggcctggtcagtgaatgcctgcaggcagcagggtgtcaggaatcacctgcccgatgccagcgctgctcttgtctggagggccagactgtcatgaagtca

SEQ ID NO: 91 - DNA, 345 bp, Homo sapiens
gggttaaatatttattaggtttgttttaatcaggaataaatacatgatttagcaaagtgtaatgcttcccactgagaaatccctctgggtgctccccaaatgttccaatcacattcgtcacaacggaaaacaacacataagatactgtgcagacatctggagttcagggggtcacctgccttatgcgggaagtcaatgtccacagtgttacattcatttctcatacgttggctggttcctttgaaatagccttttggaacggttggggaaaccacagatgtctccttgtataaacacactagaatctatgatacagaaaactgtgtaactgcacatacacatacc

SEQ ID NO: 92 - DNA, 534 bp, Homo sapiens
attgatataaaacagctttatttgagggtcctagtctgtgaggggtggacagataaaagaggtatttgtgatagggcatgaagaccttaagaccctgagggtgctgtgaacagggaacagtctgatatctggaaccaaagggcaaggaaaggtcctggggctgaagtggggacaaggggcaccaaaaagccagtgggggcaggtggtgctggccaaggtcagaggcggatgcaacaggccctcttctccccagggccaggctcctgtccagcctgggcactgccagagggtgatggcattggtccggatgctgttctgtctctgcttggacaccttcgcaaagatttctttcaggacagtctcaaaggctagctgcaacattggtagagtccagggctgaggtctccaggaagagcagtccattgttttcagcgaacattcgggcctcctcagtgggcacttcccgggcctggctgaggtcacttttgttaccccgagcatgacgacgatcgtggcttcagcatggtcatagag

SEQ ID NO: 93 - DNA, 454 bp, Homo sapiens
actttgtgtgttgtgtcttattaacaccaaaatgtgccacatcatggtttagaagaggtggagggtgcaggcaggaggctccgaagtcccaggcaggcgcgcagcctctggcatctccatggactccagctggagagcctgtccgctcagcaacaccccaggcagcaccaagaataacatgcccacaagaacatcatggccaagagacgcacaggcgcatcccgcttccaggcacctttcccacctggccagaagtccctgctgtcatcccgacttgcacggtggttttggtaaccagtgggctgtgcaggagtgaaagtggggtcactttccttcctttcccagctgctggagtcggaactgctgcctttgtttggcggccttgtttcttaaatcagttccctcttaggatttattacactaaaaaaaaaattagtttttgaaaagaaatagg

SEQ ID NO: 94 - DNA, 372 bp, Homo sapiens
acaatctggtagctgtttattgttctctgttagaagtctatatataatgaaggcacaatgagggggagggaattcccctgctacagtaccatggaaggggctggggctggggagtgggcctgccaacaggcagtggtctagtagaggttttctggaactagcctcagcttctcaaatgggccttaggacacagcccatgggggagggggcagagcaggctggctctgaaagccaaggatagctaagggtggccacctctaggcccctgacgcatggtcagcgtggggtctggctggatggggtggggcagggccactgcctattctacattcaagtgtcgctccctccgtggtcttgcagggtctctctggg

SEQ ID NO: 95 - DNA, 222 bp, Homo sapiens
cttttttttttggagactagctgaggttttattttggaccaaaaaaaaaaagcaattgaattgttttgtagctggaggcatgggcaaggggggtccagggtagtaaactccccaggtggcctgagggctagggctgagctccaggctggtgtctcctggttcccagtgtctaccctggcatagcggcctcccttccccagtgctctgtggcagacgcaggag

SEQ ID NO: 96 - DNA, 412 bp, Homo sapiens
ggagacaatgacaacggcagccgccattttattgccaatcagccatgagccccgccttccatacacaatgacatttcatccccacaatcgattaacacaaccatgatagccatgaactcccaactcctccagctgctagtgctcaacgggagagtcccctccaggtctgtctcattgcagagcccatattctttctgcccggccagcagttactctcctcaatgagcaggcactggtgcagtcttgggtgggcaccagtcacccctatggaaatccttgatggatgttacaggacaggattggatgtgaggggtcttggaaatggggctcaagaatcttcatcatgaggcgtttctgcgcctactgacctgagatacagagaggaagttccatggacaccaacacccagttc

SEQ ID NO: 97 - DNA, 522 bp, Homo sapiens
atgtgaacgttgagtacacatgagtgcgtgtatgcccccaggctgggtcagctcttctgtggattgcatggcgtgtgattaaaagcccatgtgttcccacacatccacatcatgggaaggttaatgtgtgcctccttggaactgggtgttggtgtccatggaacttcctctctgtatctcaggtcagtaggcgcagaaacgcctcatgatgaagattcttgagccccatttccaagacccctcacatccaatcctgtcctgtaacatccatcaaggatttccataggggtgactggtgcccacccaagactgcaccagtgcctgctcattgaggagagtaactgctggccaggcagaaagaatatgggctctgcaatgagacagacctggaggggactctcccgttgagcactagcagctggaggagttgggagttcatggctatcatggttgtgttaatcgattgtggggatgaaatgtcattgtgtatggaaggcggggctcatggctgattggcaataa

SEQ ID NO: 98 - DNA, 411 bp, Homo sapiens
tttttttttttttttttttttttgtagtaaaatggccagatgtttattattttgttacattatttccattgcatattccacatctatttattttcacttttatttattatcattatttttcacaaaggtacaaggaatttcagaaacaacattaaaacaatcattcaaactgtttcaggcacggtttcaattaaaagcatagatttgatttctgacttcctgtttccttctatgatacaatctcaagttttgtttcaggaagcacaattattgtagcgttaaggtggatacctgccaaagctcatctcctagtgctgtcctcattctcagaaagttcctgagtcaacagaaaggggacgcccagggtatggaataaggagatgagagcatgctctgccaactggctgggac

SEQ ID NO: 99 - DNA, 495 bp, Homo sapiens
ggatttgcaaatattttaattcacagaaactcaaggagagggtgggggtgggggctggggtggtgtgttgccgcccttctgtctttatccaggccttctccagcccccgtaagtggcaacagcattctagagacatgcagtggtgtgctagtaccatacacacaacacaaacgacacagccagcaacagtggctgggctggttggtggggggcctctggacctccaagtctcaggctctgtcacagagcagggcaggtctggtccgctcacagggtcctcacagccacgggatagaggagggacaagtgctcagcccctttgatgggtagctttctggtggtgtagtagtggatgacttccgggacactgtcgaacggagggctgttctgacccagaacgtatttctctttggttttggccagtttcatgtgcataaaaccctggttgctcctcagggagagggagtagtcatgcttgctggtctgggctgtccg

SEQ ID NO: 100 - DNA, 275 bp, Homo sapiens
gactgttcatggccatctttattcccagtgctggctatcccaagatactgccaggccacagccaacccccacctctgccaatgtgactgggtcaccaccccatacaccagagcagccttgagccctgccccaccccctgccctgcggaagctaagtccccagctataagaccctgcccctcctggtggcccaggaccctcaaagatgcacacaggggccccagcgagggctgcaccgtcattagccttctcctccaggctgggctgccaagcagc

SEQ ID NO: 101 - DNA, 501 bp, Homo sapiens
taagattttcctctttactctcgtccttacatgtccacagacttcatgtagagaggctgagcctttcgaccacaaagtgtgttctgtgttgaagatgttataatgatgggagagggcagttgcagcagcttctaaccaagtgtctacaacacatgtactactgtttcctacctgtgtcacctctgcaaaaaatggagctctgagcccagttctgtgagcatggtgtcagagccctccaaagtcctgagaaatcaataccagggatccaaatctcagacaccagtttgaagcaatacctggataccaagactcagagtgaggatatggattttgggagctgacagttttgctgatcctgccacactggcaagggctgaagtccagaaatggtgtgtagctctagtcattcttattcaccacagctcttatttcacagttttttcccttggtttcttctgtttcttctgttcctcatattcaagtattttctgttggaaatag

SEQ ID NO: 102 - DNA, 523 bp, Homo sapiens
ttttttttttttttttttttttttttttttttttttttttacagggtaaaggctctgttgacttcagcacgaccaccccagccccaggcaggcagaacagctaggtgaagaggcggacagtcccgtctgcccccgaggagaagacccacggctgggtggggtggaagatgacgtccagcactcccagatctcgggtcagcacgtgtcccttcagcaccttgacgggcaccagcaaggggttctgcagaaggtcattgtacaccatgccatggcagacgatgacactgccgtcgtccgagcctgacgcaaagagtgggtaccgcgggtggaaggccacagcccgcagagccttcttgtggtgtctcagcatcctgtatggcttggtggaaagatccaggtcaaaccacaccagcttgctatcgtagctcccacagatgacgttgtcacctgcagggtgcaccgccaggctggacacccatttgcagttgggcatcagcttcttggtgagctcctggcgcacaag

SEQ ID NO: 103 - DNA, 395 bp, Homo sapiens
tttttttttttttttttttttttttttttcaatgccaaaaactggtgatttatagaaatcaccctggtttatttttttcaacaaaggaaaaaaaaacatggttcaataattcagcatttgggactctggcaagtactgtctgcattgttcaaaataagtgttcctggctgtgagctctgcaacacatactgatggcccaggaaccttcttccatggttctaataaaacaaaggacccacacatggaggttacgtgagtcaacaaaagatgctctatcacaatgtgcgtaaaaagcaagtctttgaaaaatatccagatctctaaaggaatacaaacactcctatttggttttgtttttgttcatcttcagtattatattttagttgttgaggaaa

SEQ ID NO: 104 - DNA, 506 bp, Homo sapiens
tttttttttttttttttttgagctgctgggaaccatgtttttgattttcagacaggtgttaattttaccaggcttcattaatacagaagaaaggaaacgtcttccaggaaagcagccactgcggaaacgagtgtgtccggccatcaatacacaagagactctttgtgactcaacacgtggggtcgcgaggcagagctggtggcactgcggatcacttccatccacctttcgaacgtgtactcgctttccgccctgaagtagtagacgtgggacttgaagtgcagcttgaacacgtagtctttctggatgttctcggactcagaggggatggtgagcgagtagccgagcagaggcaggctggcaaggggatgattgtcctggtgtgatttgtagaagaacaggcagaagtttgtgaacaccacccacagcttctgccacccgttgctgtttttgaatttcctcagcaggtttccagacaactgattctccactgcgatgctgaagtc

SEQ ID NO: 105 - DNA, 413 bp, Homo sapiens
agatttaaaaaacatttattttaataagactattgcaaacacattaaaaaaactaaatagtaatattacaaaatctatatacttgcacatttagtatttgtcaatgtgccagaggttttcttcatgaaatttgacttctttgaagtgaaggcttttttccatcatctcttatagctctgactgaataagtcttaatgctttcttcatgttttctatcaataggggtaaatcccgaggctcatatgtgtacaatctgttagagtatcttccagctatgtcagctctaactgttaaagaagggtctacaaacatgattctaggcacatattgcccatcaggtgataaattcttatcagtggtttcatgcataaggtttagcatgatgaacttattctgagccatttcttgtattt

SEQ ID NO: 106 - DNA, 229 bp, Homo sapiens
ttgactatctttggaattcatttcattaaggttttcacaaaatacaaagctcaaacgtaatcatctatgtccaccacaaaacagaatcaaataagtggttagcacaacaaacatagtgatcttttccattttaaaaaatataaataacaatgttcaaggttttacagttttcttagtgtgtgtctttttaaggctttatgttgcagacccttcattaatggtacttgta

SEQ ID NO: 107 - DNA, 472 bp, Homo sapiens
aaactttggcatttttattcagacacgtataaaaacaaaacaaaaaacttcagtgatacaacagacgttttcccttagttccccatccaaggggacagaggtgtgcagctgaagctggatcttttttctgtcctacctggaagcttctcactgctggatgagaatggcttctaaaagtggatcttggggatccttgtgaatttgccctcggataaggagtgaagatcatttacggcacatgtggattatggtttacacaaagatgtccagttatttttccttctgactacccccaccaccacttcctgagatgagatgtctaggtataggaggatgtggctgttggggttagacttgattcagtgcaaaaacaagaaacagtgccccttaaacaagggctgtaacttaaatcagtttttcttggcaccttacaataagagcacatgcacaggaattgggaggattttgcatc

SEQ ID NO: 108 - DNA, 445 bp, Homo sapiens
ttcaagatgtacttttaattgccaatatttttatgtatttacaagaaatattctgtaaagggtaaataaatgtacaagagagcacaaaacagaacagaaagaatactcatgcatttatacactgaagctgtaacagcatcataatggcctgggagtgttcacgcagttccctaagtggctaaattacacccaggagattctcattcagcaatataagctgttagtgctttcacacgttttgggaaatgcatccattgccccattccaagcttaattggtataataaatgtcaattaaagctcctttaagatttcaaactgcaaaactcaagtgaaactacttatgtagagactcatataagactcctctactaaaaggctctcccaaaagagacacagtatatttacatttaccatgggtacagggatacacgtcattcgcatag

SEQ ID NO: 109 - DNA, 565 bp, Homo sapiens
tttggaggtgaccgagcgtcgagttttcacatctttattattgttgttgttgttgttattattattattattatcatcatcatcatcatcatcatcatcgaagtatttcacgtccagagctaagacaagactacaaacacaacacatagaaaattaataaaatagaactttgttttcttctgaggctcctcttcttacttctaggtagtatgtgctccttccagtggctttggggagggggtgggagagacgacaggtctgggatcagggagtcttcaaggcccccgctgaggggacagcgaatctaccattgaaccgtgcacgggggacatggacaaaatgagacgcgacagggacaagagcattttgctctgcttccaggaaacatcaagtgagtccgctcctcagttctcaccaggaagcctgatcaggctgaggcgagttcctcgggaaggaagggcgcgcgggatgctgggtgggctcgagtagtgaggcctcaaagcaccgccggagctttgcgagcggggcgtccaggaaacgctggcccccctttcttcgctgagag

SEQ ID NO: 110 - DNA, 337 bp, Homo sapiens
ttttttatctatcaattcttccattactttcttttaattcaaacatgcatactacaaagaaaggtttctgtcctttaattttttaacagaatatacagagccacacaatacgatttcaatttcaaattatgggagatcatattcaaatatgcttaggtttgacaagttgctgttacaatactgagaactttcatgaaaacggtatttaacaatttttaagataatcaaatatctttttgctacgtgggccaacgcattaatactaacttgtttaaaaatgcagtcttttagacttcaaattattataaaacaatatcaagatcatatagatatactt

SEQ ID NO: 111 - DNA, 457 bp, Homo sapiens
tagtttttctaagatcccttctttatccacatcacttcagccaacaatctgattggtatttccaagacaacagagcagtatttcaaactcatgaatgggattttaatgtgctgtatggaatttgaagcctcaaacttaaggaactttccacctggaaagcattcttaagtaacatcaatgaactgtcctccctaaaacctagacacagtatcactgtggaaacagagtaatagttctggaatcgattgaggattaggttagaagcgcccacaccaggaaaagcttccgggaaacggttttaggacagaatcaaggcacacctgtggaacctctttctgcatctgtcaaatggggacgctgtgtctcctctcttcttaggagaggattaaatgagccagagtgggctagcacagtgcctggcatgagactacagtttcactgggtgctatactcacta

SEQ ID NO: 112 - DNA, 365 bp, Homo sapiens
ttacttttagaattttattgacttttttcttcataactttaaaacaaaaacagcgcatgaaaaccagtgtcttattccaaagtctcaactcagctgattgccaggtgaacatcaccatcttactcctctgaataactagacacaaattacatagcaagttcgtgtttctgcccacccaagacacagccagtaatcagtcacaaacacagacacagccaactccaggggctccagctttctgcccatcttctctcagcagttcctcccatctgctaagatgcgccttcctggtggctctctctcaaggtgggtcaaggctgaacaagacagaaaagcacagtctaggtccaccatcacctcccact

SEQ ID NO: 113 - DNA, 446 bp, Homo sapiens
tttcctgatgctctaggttggtttatttactttgatggaactcactggaaaattcttcaactccacgcttcactgtgcctgtgtaggatgtgttttctgggcattggatgtagatcttgtcaatcaggtactttcctggagcacatatccacccaggaaagagatttataaaaataagtaaattccttggccctgcctcccctttcagggagtttattttcttatagaaggcctcaggttttccttaagtgttttcagggtttctccattgccccccaaaagcaagatagaatccttgaactatcttcctcttttggccaagaataaatttcaaaaaggctgcatccggaagagaacccttggccttctcagctgggagctgggagcacacgtggaaagactggctcagatccatattcttgccaaatttagtcacacaaaggggc

SEQ ID NO: 114 - DNA, 470 bp, Homo sapiens
tttttttttttttttgagaaatcttgcacaaatggcattttattaaagaaaatctaatttacaaagctttgtaaattttaagaaaaacattcatagatcataaacaaaaatttcaatatgcaatattcaaatttacaagaaaataagcacaaacttttagacagtgcagttattgctgcactcctttaattccttatccagagcccaaaaaatgtagacaaaccctaaaaatgtagcagaagcatttccgcacactggtgtccagaatctagtttgtgcagaaatgtttccactagatttatagagtactcttcagaagaaagaggcgagggctcgtcatttggtcaccctttggacattttgcaactcttcaatgggtttccattgttggttgattgttataagcttttgaggtacagtagggtccacagtttcccaaggttctggatttttttttcgatcaaggatca

SEQ ID NO: 115 - DNA, 1867 bp, Homo sapiens
  misc_feature (1)...(1867): n=a,t,g or c
gcggccgctcgcccctcggggaatatggcgccctcggggctgaaggcggtggtgggggaaaaaattctgagcggagttattcggagtgtcaagaaggatggggagtggaaggtgcttatcatggatcacccaagcatgcgcatcttgtcttcctgctgcaaaatgtcagatatcctggctgagggcatcaccattgttgaagacatcaacaaacggcgggaacccattcccagtctggaggccatttatttgctgagccccacggagaagtcggttcaggccctgatcaaagacttccaggggaccccgactttcacctacaaagcggcccatatcttcttcaccgacacctgccccgagcccctgttcagtgagctaggccgctctcgtctggcaaaggtggtgaagacgttgaaggagattcaccttgccttcctcccctacgaggcccaggtgttctccctcgatgctccccacagcacctacaacctctactgccccttccgggcagaggagcgcacgcggcagctcgaggtgctggcccagcagattgccacgctgtgcgccaccctgcaggagtacccggccatccgctaccgcaagggcccagaggacacagcccagttggcccacgccgtcctggccaagctgaacgccttcaaggcagacactcccagtctgggcgagggcccagagaaaacccgctcccagctgctgataatggaccgggcagctgaccccgtgtccccactactgcatgagctcacgttccaggccatggcgtatgatctgctggacatagagcaggacacatacaggtatgagaccaccgggctgagcgaggcgcgggagaaggccgtcttgctggacgaggacgatgacttgtgggtggagcttcgccacatgcatatcgcagatgtgtccaagaaggtcacggagctcctgaggaccttctgtgagagcaagaggctgaccacggacaaggcgaacatcaaagacctatcccagatcctgaaaaagatgccgcagtaccagaaggagctgaataagtattctacgcacctgcatctagcagatgattgtatgaagcacttcaagggctcggtggagaagctgtgtagtgtggagcaggacctggccatgggctccgacgcagagggggagaagatcaaggactccatgaagctgatcgttccggtgctgctggacgcggcggtgcccgcctacgacaagatccgggtcctgctgctctacatcctccttcggaatggtgtgagtgaggagaacctggccaagctgatccagcatgccaatgtacaggcgcacagcagcctcatccgtaacctggagcagctgggaggcactgtcaccaaccccgggggctcggggacctccagccggctggagccgagagaacgcatggagcccacctatcagctgtcccgctggaccccggtcatcaaggatgtaatggaggacgccgtggaggaccggctggacaggaacctgtggcccttcgtatccgaccccgcccccacggccagctcccaggccgctgtcagtgcccgcttcggtcactggcacaagaacaaggctggcgtagaagcccgggcgggcccccggctcatcgtgtatgtcatgggcggtgtggccatgtcagagatgagggccgcctacgaggtgaccagggccaccgagggaagtgggaggtgctcattggctcctcacacatcctcaccccgacccgcttcctggatgacctgaaggcactggacaagaagctggaggacattgccctgccctgacccctgccccgccccctacccctccctttccagagaaataaactcttcccgtcntctgccac

SEQ ID NO: 116 - DNA, 41936 bp, Homo sapiens
gatctgcccgccttggcctcgcaaagtgctgagagacaccatacccagcctaaagggagcgattctattctactattcttccttctgctaatccttccattctttaatttaataacgaagattttttgagtacctgtcatataccaggtgctgttctgggccctgggaatacagctgttaacaaaatcatcaaaccacttccctcgtggagcccacattgcagtgagagagacaaacacgacacacactctcaagtccttgaagataaagaaaactgggtaacggagagaagaggccagggtttgttctataatcattaataacacgagcagtaagaagtaaaatttatctaagtaacaacttataaagggtctactgtgtgctaagctctcatccaggttcccaaggattaactcagaccacacagtaattgaatagattctatcattgtcatcttacagaggcccagagagagaaagtgacttgcctagtgtcatagctggtaacggggctgggattctaactcagccactttgggtctagtggccaagctcctaatccctttgcttgcctagggtggtccgcagaggactcacagaggagatggcaggagtgaactgcaggggcaagagagcttaatggagaaagcctgtgacatgccaggaactgcacacatattctcccattgagtcctctcctctaccctcctgacagctgaggcacagagaggttaccttgttcaaatgggtgcataggaagtcaaagtctggagctggggtttgaacccaggcagccctgagaaccttgttctttttttttgagacggagtctcgctctgtcgcccaggctggagtgcagtggcgggatctcggctcactgcaactccgcctcccgggttcacgccattctcctgcctcagcctcccaagtagctgggactacaggcgcccgccactacgcccggctaattttttgtatttttagtagagacggggtttcaccgttttagccgggatggtctcgatctcctgacctcgtgatccgcccgcctcggcctcccaaagtgctgggattacaggcgtgagccaccgcgcccggccccttgttcttaactgtaatgctgcctcctgataggatgtgcctgttgggactaagtaaggggcagtcattcattcattcatttggtatttatcaagcatcgactatgtgtcgttggtgctggggatagaggtgattgggatggctgaagtttctgtcgtcaaggagatgacattctggtggagtgagactggcagtaaataagcagataaagaaagagtatgagaatttcaaagtctgggcacggtggctcacgtctgtaatctcagcactttgggaggccaaggtgggtggatcacctgaggtcaggagttccagaccagcctggccaacatggtgaaaccccgtctctactaaaaatacaaagattagccaggcatggtggcacatgcctgtaatcccagctactcaggaggctgaggcatgagaatcgcttgaacccaggaggcagaggttgcagtgagctgagatcgcaccactgtactgcagtctgggcgacagagtgagactctgtctcaaaaaaaaaaaaaaaaaaaaagactccgtcaaggtataagaatgtcagagagtactaagtgttgcaaagaaaataacaccaggctgggtgcattggctcatgcctgtaaatttcagcactttgggaggccaaggcaggaggatcacttgagcctaggagtttgagaccagcctggacaacaaaatgagaccccatgtctacaaaaattttaaaaatttaaaaattagctgggcatggtggcatgtgcctgtggtcccggctgctcaggaggctgaggtgggaggattgcttgggcttgagaggtcaaggcttcagtgagtcatgatcgtgccactgcattccagcctgggtgacagagtgagaccctgtcttgaaatgaaaagaaaataggctgggcgcagtggctcacacctgtaatcccagcactttgggaggccgaggtgggtggatcacctgaggtcaggagatcgagaccagcctggccaacatggtgaaatcccatctctactaaaaatacaaaatttagccgggcgtggtggtgggcgcctgtaatcccagctactcgggaggctgaggcaggagaatcgcttgaacctgggaggcgaaggttgcggtgcgccaagattgcgccactgcactctagcctgggaaacagtgagactccgtcttaaaaaaaaaagaaaaaagaaaatagcactgggtgatgtgctacatggaatgacttgggctgtgaatatgatttgaggagggcctgggcctgggccttacagaacctagaaggcagagaggaaggggaggggcagggtgccagggatgaaggctcacgtacctcatgtcttagtgtgtgttcactgtcttaaacaagaatttaaagttgggcatggggcagagcggggaagggagcatccctttgcagaccccaagaagccaggaactggagcacattctgctagaggatcgatgggaagcagggttccaggggctgagcctatgtcagtcctgtttcagaggaggcaccaggcttgcttgccctgaatttctgtgggcagctcagccatgagcatcctactgttattgaggtcacagggctgcttaggccccctcctctctaacccagggattgtgcctgcctggaccaggcgtgactgctaagcttctgccaggacaagccaaatactgagggtgcttcctctgctggacgcaaaagtccaggatgaccccccaggctctgtctcggggaaggggccctgcatgctccaggggcctcacaggcctgggtctttcaaaccacccccacctgggcctgtgtttgatcaaggccctgagtgtaaacatccattgtgtgtgtcctttcaggaaatcccatagccataggagcttcctctgtttcagctttgaggatggggaaaagtggactccccgtggtgttcctagggtcacccactgtgctggggtttttctgttgttgttgttttttttctgttgcccaggctggagtgcagtggtgcaatctcagctcactgcaacctctgcctcgcaagttcaagtgattctccgcctcagcctcctgagtagctgggattacaggtgcacaccaccacacctggctaatttttgtatctttttggtagagatgggatttcgccatgttggccaggctggtctcaaactcctgacctcaggtgatctgcctgccttggcctcccaaagttctgggattacagatgtgagccaccatgcccggcctatcctggtttcaaaagtgaaaatagtcctggataaggtagaaggctgtccactccaggcatccctccggtccggtggctcattccctgctttgtccttccatgctttgggtgatggaccagcacctggacaggaggccctgttccacctcctcgggctccttggggtccaagtgcccccacctccagctgcactgcagcagagagcccatgggacctctgaaatcatgaaggtcacctttgcggtgtataaagaaggaaccagaggttggagatgtggaggaggcctggctgctgttcccactggagacctggcatcttctccccgacctaaaacaatgaaagcagtgctcagcccggatgagatcacggccagcccaagaccaggaacagggtacgccctgcaggaagaaggtgtgcccagaccttaggatggatcaaaagaagccggaaaactatattttttgtgagttttgaaaatgtcagacaggtcaaacaaaacacagtgaggtccagcctcggcctacaagatgccagatttcaacccctggcctatatgatctgtttgccatggcaggcggttcctgtccacctcttttgtttatagcagggaccagctcttgagctccagtgttgaagaggcacggtcagggtctgatctgaagacactggtggctcatgcctgtaatcccagcacttcaggaggccgaggcaggaggattgcttgaggacaggagctgggagaccagcctgggcaacacagtgagacccagagactacaaaaaaataaatttagcggggcatgatggcacaccctgctactctggagatgggaagattgcttgagcctaggagttcgaagctgcagtgacccatgatcgcaccactgcactccagcctgggcgaccaagctaggccctctcaaaaaagatacaggtggaaaaatgatggacgaagagggcattgtggcaaacctggggatttaggagaacctagtttggaattctatgaggattcaatgaaagaatgtgtgtagaggggcccagcacatagtaagagctcaataaacggtgggggctaggggcggtggctcatgcctgtaatcccagcactttgggaggctgaggcaggtggatcacttgagccctggagttcaagatcaacctggacaacaaagcaagatcccatctcaaaattaaaaaacaacaccaacaacaaaaaaacagtggcttagatgcctgatcattagggtaagtcgtgtcctcaaccccttcacatctgctctgaaggtcaccatatccggaagccttccctggcctccttgtttaaaatggcacagcccccactccacgcctggcactctctgctgtccctgattcgttttctccatacagcttatctttgtctgatatgtgacatagttaacattttatatttgtctttctttcctagttagaatctgaactctagaagggcaagggcaaggatttataactcaaaggttccgggcttaggcctcttttatattcttgattttgaggttaattaagagctcaggcctagcgaggtggctcatgcctggaatcccagcactttgggaggcccaggcgggcagatcacttgaggtcaggagttccagacctgcctggccaacacagtgaaaaacctgtctctactaaaaatacaaaaattagccagttatgttggcaggcgcctataatcccagctactcaagaggctgaggcaggagaatcgcttgaacccaggaggcagaggctgcagtgagccaagatcgtgccactgcactccagcctgggcaacagagcgagactccatctcaaaaaaaaaaaaaaaattaagagctcaaagagtttgttttcataggcagcagaatgagaaaagtttacaaaatagtttaaatgacaataaagtcattatagattaacataaataaaataccttttatgaaaaaaataatcattttctgaaatcagacaaaacattgtgaatgagaaggtggcatggttttatttttttgcaagtctccgaagcctggctggatagaagagcctggcttctcagagctgcttcagtctgttgtgatatctattgtatgtcacgtagcctctggaaaactccacagttagtattgttgggaaaataactttgacctcaggatctcctgaaaacgtcttggggaaccccagggtctagaggctgcagtttgagaactgttgctgtggtatcccaggtgtctcaaatactgcctagaacataggtggtactcagtaattattgttgaaggatgaatgaatgaatgaatgaatgaatgaatgaaagaaagaaagaaatgtgtctttgaatccagccatgtgcccagaatgatgagacagatgacaaaagctaagggactttagcatgaggagagggggttcgtttccttttttttcttttttttttgagatggagtctcactctactgcccaggctagagtgcagtggtgcaatctcagctcactgcaatctctgcctcctgagttcaagcaattctcctgcctcagcctccagggtagctgggactacaggtgcgtgccaccatgcctagctaattttttacatttttggtagagatggggttttaccatgttggccgggctggtctggaactcctgacctcaagtgatccacctgcctcagcctcccaaagtgttaggattacaggtgtgagccaccatgtccggccaagagggtgttcatttctgctccttgccaggtattgtgtcaggcactggggacccagcagtggctgagacagacagggctctgcctcacggagcccacattttcaccaggcaaaggatggtcggcccctaagctgggagataagacttcagcagttgggtgggggagccgtgggagaagcccagcccacagggggacagtgcaaatctagaaccaaggcgatggcaggggtgaggctggcacggtagctagagaccacgtcgtgccaagggccttggggaccatgggactatgggaccttagggaaggcgtctggaatgctgtagccagacactgttgcaaggaggatttttctgtagacatgaggccttccttatgaagaaagcaagggttctttcattcctgggggtgccaggtgctgtggactgcagcacgcgtggttgctgccgtcacagagctgtcatgcaggagggcagcgcgtccttgggaaggtggcaggcaggtcaggctaggaggaaagaggccgggaagctgagggcatttcctgcccgagatgcccaatgtagcctacttctgtccccagtggcttaaggcagagttgcctggtaggtgccctggtcccaccctggtgaaaggctgaaggtatttaattagtgcctgagaagcagagaggaaacaggatgtgccaaaacactttgatggatggtagagttaacaggctccttgcctgcagctgcttcagacaagagcgtccccaagccctgggcctgacctggaatgtggggatggaaggggagggggaggaaccaaggcactgggagggtaagtctctctctcccacatagacacacccactccttatgggtgcctgggcatctcctggtacctagaatctggcctgtttatctccacacccatccctggggtctacactaggccctgtgggtggcagttcacatcaggggagttctgactttggctctgagaggtggttcagagatggctgtaagttgagaagcacagactgctgggtgtggtggttcacgcctgtaatcccagcactttgggaggctgaggtgggggtggatcacctgaggtctggagttcaaaaccaacttggtcaacatggcgaaactccatctctactaaaaatgcaaaaattagccaggtgtggtggcaggtgcctataatcccagctacatgggaggctgaggcaggagaattgcttgaatctgggaggcgaagattgtagtgagccgagattagttcgcaccattgcatgccagcctgggcaacaagagtgaaactccgattcaaacaaaaaaaaaaaaaagctgggcatggtggagtgcctgtagtcctaactactcaggtgggaggattgcttgagtccaggaggttgaagttgcagtgggctataattacaccactgcactccagccagggccacagagtgagaccctgtctctaaagaaagaaaaaaaaaaacaacctcaggctccgagggcaccattactgctctatactgaagagctgtgcagcttttccagacccgaaatgtcatccacaaaacagaagtgataatggtcctgcctcacagacttcttgcagtagtccaggtgtttagaacggggtgtaaaaggccgtgtgcccttggtaggaatctttgcatatgcatttgatcatctgcagcctgcccagcccactgcttgccccctcctgggtgtgctgggaaggggtctttggccctccaggggttaggtgccccagcctccaaggtgccctcacgccttttcatcccgactcagatgctgacctgacctttgaccagacggcgtggggggacagtggtgtgtattactgctccgtggtctcagcccaggacctccaggggaacaatgaggcctacgcagagctcatcgtccttggtgagtgggcctgggaagggggaggcatggcccttccttttgtccgcttctgttctgtctgccctcccctgtgtccgccctctgccctccagcttaccctctgggctctgtcgcctgctctgctctcccccaggctctgccagtcacttaggctcccctgtgccctgcaccccaggcagggaccactggcccacagtgcctccaatcacccaagccaaactaagagaagagtggagacaattggagactctgccttttcaaagtctcatttttaaaaaaaatccagacttggggtccgggtgcggtagttcatgcctgtaatcccagcactttgggaggccgaggcgggtggatcacttgaggccaggagttcgagactagcctggccaacgtggcaaaatcccgtctctataaaaaatataaaagccaggcgtggtggtgcacatgcctgtaatcccagttactcagaaggctgaggcatgaggattgcttgaacctgggaggcagaggatgcagtaagccaagatcaagccactgcactccagcctgggcgacagagtgagactctgtccaaaaaaaaaaaaaatccagacgtggtcagagtccatgggcagtgaatgaggacagttgatggtgtgcaaaatcgacccacctcttgctacatccccaaggcctcatctcacccgagtccctcgccaaagcacagcggttttgccgtgtgccctgctgggatggcgctgcatggcacacacactgtgtaagtttgagtgcagctgaaacgaagccgattccagacacccaggggcagggcggggtgtccgtgtggctgggaggcctccttgtgttagggggatgttgccatcggccaggtgccctgctgtaagccaacacatggagtcttgtatgacatgtgctctgcatgagtgatgccgctgggctgtacactgccatcttcacatgtgtgaatgagcacgtgactggggggtacttgggctgcaagacagagttcatgtgtgggggatggaacacgtgcaccagtgacccaggaacctctgcctgttcttcggtaaaatgcaccatttgcatcagcagttcccaaaattagtctccaggtctatttacactctaaaacattatcgagggtctccaagagcttttgtttgtttctgtgggttttatgtctatctgttgcttaacatattaggaattaaaatggggagattttccttttttttttttttttttgagatggagtctcgttctgtcgcccaggctggagtgcagtggctcgatctcggctcactgcaagcttcacctcctgggttcacgccattctcctgcctcagcctcccaggtagctgggactacaggcacccgccaccacacccggctaattttttttgtatttttagtagagactgggtttcaccatgttagccaggatggtctcgatctcctgacctcgtgatccacccacctgggcctcccaaagtgctgggattacaggcatgagccactgcccggccttaaaatggggagatttttcaagcccaagatacacaaggaagactgggcaacatggcaagaccctgactctacaaaaaattttaaaattaaccaggcatggtggcatgcacctgtgagcccagcttcttgggaggctgaggcaggagtatcgcttgcacccaggaggtcaaggctgcagtgagccgtgactatgctactgcactctagcatgagtgacagagaccctggctcaagaaacacaaacacacacacacacacacacacgcatatagtccattaggcatcagggcgatgatggcatcagggagcctgggaaactctactggacattcatgggagaacaagtgaaaaaggcaaataacatcttagtgttattctaaaatttcttcttttggccttgtggacaggaccacgctttgagagctgtgactgacatgcctctgtcctgttgcgagggcctatagtgccaagtgcatgagctctggggagggcttcgtgggtgcagagctgggcctgtggaggcccctcagacacaacactggtggggctcagagctccaggggcactcgagggaagacaagaaccggctctgagatgcgtgaatgtgacagtgcatgagtagagatggagaccttgtgggtcccagaaccaggactgcatatgactttcatatgtgggtatttttgccttcatgggtcccttcctgttttaaaaaaaatgtgtgattatgttgtcacaaagagtttattcctgtatattgtgttaatttgtgttcagatttgtaaagtaaaattaaaccatttcagccaggtgtggtgacacatgcctgtagccctagctacttaccccagaggctgaggtgggaggatcgcctgagcccacgaggttgaagctgcagtgagccatgatcacacccctgcactccagactgggcgacagagctgagatcctatttcgtgggccctaggtccctgtgcctgctggaacaggacatccctatcaccgtggttggagccctttggggtgctaagacctatgaatgagggaaacttagggtgcccaagctgaggtagagccctcagaaccccctgggatttgtattggagccctcgtggcataacacaggtggattatgcaatgggagtttcttacctataagcacccacatgtgggcgggtggagggtaggagccatgcactagggcttcagcccccagccccttcccgcttcagggcacaccttgcacttggccagcctggagctgggctttcgggggtggcacagcctgggctggctctggccagcataatctgtttctcttttgtccctccagggaggacctcaggggtggctgagctcttacctggttttcaggcggggcccatagaaggtacggggggtggatcctgagttgggcttctcgggagctcccatacatcacctactgcttctgactctagttagtatccccttccccactaaaccctgctcactgtggacccctcactaacctggcctgactgtggctctgaggcatctagtggtctggcgctgggcctaggctaggctgggctgaggagagcctggggtgcaggccagggctctgtgactggcacctgcggtgctcttgagggtgtggcgtctgggcagctggctctctctttggtctgggggctgcagtctgtctccctctgtgcaggctgcctcgttttctgccttgtgttttttgcacctgggggagggccgtaactggggaatggccgggatggtagaatggggagtgtgctgtgcccagcctctggcacaaaaaatccagccagggctgcaggttccttggtgagctttgcaaatcgtccccgacctcagtgctggctccgcaccatgtacccctgctgtgccgttagccctgttccctcccaggcctccgggctcagggcctgttgtctttctgcagactggctcttcgtggttgtggtatgcctggctgccttcctcatcttcctcctcctgggcatctgctggtgccagtgctgcccgcacacttgctgctgctacgtcaggtgcccctgctgcccagacaagtgctgctgccccgaggcccgtaagtgtcccgctcatggccaccctggtttgggcaacatcctgcatccaagggaaggaggtggccatccacctgcccccaggacagtggcgttggtctggagggtgtgaatttagccagtggggagaaagtaggctgaggagggtctgctgtttagattgtcgtttacttcctccaacttttagtttatttttatttatgttgttcttttcttttgtaagtataatccatacacatggtaaaaatgtccaacagtacaagatactagtcacatggaagtaaagccctctaaaaaaaccaaatcttggctaggcgcagtgattacgcctgtaatcccagcactttgggaggccaagacgagtggatcacttgaggtcaggagttccagatcagcctggccaacatggtaaaacccagttctctactaaaaatacaaaaattagctgggcatggtggtgatcgcctgtaatcccagctactcaggagactgaggcatgagaatcgcttaaacccaagaagtggaggttgcagtgagctgagatcacgccactgcactccagcctgggcgacagagtgagactctgtctcaaaaaaaaaagaaaaaaaaatgttaagtgaaaaagttaagaaaccaaacaaggtttacaacactacatgatttaagcaaaaaaaattttttttgttttagagaaagggtctcattctgtcatccaggcagtgcagtgcgatcatagctctctgcagcctcaaactcccgggttcaagcagtcctcccgcctcagcctctggagcagctgggactgtaggcacacaccaccatgcccagctaattttttgatttttgttttttgtagagacggggtctcagtatgttgcccagcctgatctcaaactcctggcctcaggtgatcctcccaagtcagcctccccaaagtgctgggattacaggcatgtgccaccatgctggccaatttttaaaaattttctgtagagacagggtcttgctatgttgcccaggctggtcttgaactcttgacctcaagtgatcctgcctcaggctcccaaagtgatgggattacaggcatgaactaccacacctggccttaaacttaagcaaatttttttttttttttggagacagtttcactctgtcgcccaggctggagtaaagtggcgtgatctctgctcactgcaacctccgccccccgggtttaagctattctcctgcctcagcctcccgagtagctgggatataggcgcctgccaccacgcctgactaatttttgtatttttagtagagacggggttttgccatgttggccaggctggtctcgaactcctgacctcaggcagtccgctcccccgcacccctaccttggcctcccaaagtgttaggactacaggtgtgagccaccatgcctggccaaatttaagcaaatgtttgaaaacacatacccacaggaatgctgcacattttacccagctactatgtctagggtcgtatctagcacaccagcatggctactgtggagagctgggactggatgtgagatgagagctaaaggggaagtaagcaaaccaagcaggggaaggtaagagaagacagaagacagagagagagggacctaactctatgagaggagtcagacatgtgcaattgaaaaagacttgctcctgtctctcttctgtgaatgtttgtgaatatcccaacgggacactttcacagaggagctgattgacgtggtcacagccatcagccttgggacaccagaccacagtgtgtacactaagtggcactgatggacacttcagcatccctctagctgctgtcccgtttcccctcctcggggaccacagctgttgccagtccttggtttccttcaggagggtgtctgggtagaccagcctgtgtgcacacagtccaagatacatgaacagtgaagtgccaggcaatccttgcaagcatgggcaggtggagagctgaggcctgcttgacaccttcctgctcagaagcccagtgagcagtttccctccctagggctcagtgtcatcccctataaaatggggcttatggcagagctcaccacactgggtgcatctggggatttggcgagctcatgtgcacaccattgagcatggggcccaacctatataaaatattctacgtctgtcagctgctgggcactgccactatcagcctcagtagtgactgagggacagggcaccagtcagagccctggtgcacacagagtgaccccagagaagcagccttccctctctgagtcctgtttccttctgttaggtcctgacttcatgggttgttgttagcattaaggaagtcgctggctaattttatagtcattgaagtcagtggtgtgcaacctggttcctcaaaggatcacttccctgaaaaaattccactgctccctggaggcttatgcaggccatcccatcccctccctcttgttgtgttcagctgacagctttttgctcagtgagtaagtgttaggtccatttcacagatgggctgcaaccaagtttgcagtgaacccactaagaccagagctagggccaggactaaatgctggtcccaatgccacattcccctgtccccacaccacatttcctccatccggagaccctgttaccccaacccagggccccattaactccctggcagaggccctgttacatctgctgctgccacagcctccgcccacccttcaggaggcagcaggtcccactgctgatgataaagttgcaggctgcctgagctaatgaaggggcttcctctaggctgtgcacttagtcttctgcttccaaaccaaatcagaggtgaggcaccctctctgggcccatctctctcctccattttcctgttggggtcccagggaggaagccacttgcctagggcccaggaattttgcaagcctcttgccctagggaggaaggaagggaggaggatcttaccttgaactgtcaagcctagagcctggtggggcaggcagaaatgggtgcagtccatgagttagaaacactagaggagacactttgctgcttggccggggcaggcaagttaattcccgaggctcctgccactgcatctcaatctggaaggtgaccaggtgggcaggacccacgtctcccagatgactcattttttctagaacaggggcttggctgccaaagaggatacttgatttcggcttgtggggacagtggtggacccagcatctgggctttatataaagggcagctttgttgccctgtaaacacacagaccatgggtggccacttcttccagtaagttagctggggagttggaagtttaggtaaaaccttttgattgacaaatgttggcgaattaccatgctgttaaatgaaacattgttctgccaccctggggctgtgggtgcctgcgtgcaccctctgaaaaatcacacaggaagtggggtggggtctctgtgaagctggtgtcccccagcctcagggatgctgcagaaatggaatgaggaccaacagggactcagatgtccaaggaagctctacagcggagaggacggcttgggaaggaggtccaggcccaggtccctccggaacccaatgggtatggggcagcctggctcctgcctcatcccccttctcctgttgattgtgtcctcacagtgtatgccgccggcaaagcagccacctcaggtgttcccagcatttatgcccccagcacctatgcccacctgtctcccgccaagaccccacccccaccagctatgattcccatgggccctgcctacaacgggtaccctggaggataccctggagacgttgacaggagtagctcaggtgaggccgggggaagcaggaacagctggtgggagtgtgctgggcatctggacactgaggggcaggggctggaaggaagagtgtcttgggagccgaggaggggctctgctcctggtgcgcggccactgacagccactctcccccagctggtggccaaggctcctatgtacccctgcttcgggacacggacagcagtgtggcctctggtgagaatccatcgtcccgaagttggatgtgcctgtaagggagaggggtgggccaggatccatcctcccaaaccgaccaccacccccctgtccctagaagtccgcagtggctacaggattcaggccagccagcaggacgactccatgcgggtcctgtactacatggagaaggagctggccaacttcgacccttctcgacctggcccccccagtggccgtgtggagcggggtaagcaggagccttggggtctgagggcttttaaggtgggggggtgaaacatgtctccctgatacctgccgcagggactcttggtgcaaaccctggaccccgggctcctccagcagtcagtgacaccccccttccctgcagccatgagtgaagtcacctccctccacgaggacgactggcgatctcggccttcccggggccctgccctcaccccgatccgggatgaggagtggggtggccactccccccggagtcccaggggatgggaccaggagcccgccagggagcaggcaggcgggggctggcgggccaggcggccccgggcccgctccgtggacgccctggacgacctcaccccgccgagcaccgccgagtcagggagcaggtctcccacgagtaatggtgggagaagccgggcctacatgcccccgcggagccgcagccgggacgacctctatgaccaagacgactcgagggacttcccacgctcccgggacccccactacgacgacttcaggtctcgggagcgccctcctgccgaccccaggtcccaccaccaccgtacccgggaccctcgggacaacggctccaggtccggggacctcccctatgatgggcggctactggaggaggctgtgaggaagaaggggtcggaggagaggaggagaccccacaaggaggaggaggaagaggcctactacccgcccgcgccgcccccgtactcggagaccgactcgcaggcgtcccgagagcgcaggctcaagaaggtgagggccgccctccctggcgtccagaccgtccctgggcccccagccggtccccgcggctcatacccttctttctttctcccttgcagaacttggccctgagtcgggaaagtttagtcgtctgatctgacgttttctacgtagcttttgtatttttttttttaatttgaaggaacactgatgaagccctgccatacccctcccgagtctaataaaacgtataatcacaagctctggagagaaccatttgttcggccgcgcggggcgggggaccggggctgctcccgtatgcgtctgtaaagcgccgcgtcccgggggcaccggagtccggggccgggaggaagagacccagcctggcccggcccgcgcccgcgccgccggccggagaacgtgccccgcgcagccgccgcccgcctgcgtgcgcgccccggccccgcccaggcgtgcgcatgcgccccggccctccgccttcgcgcaccgcaggctggccgtccgggacgcgcgcgcgctcctctccccttccagcccatcccccccagccccccaccgacctactttactgtctccaaactcgggcagcccacctggcccccgacgaccccagcccctgcaccgggtaccccgacgttccatccagacccgcgtttcaccagggcggcgcgcggcgacctcgcgccccgcggagccccgggctcgcgcgcgcccgcccgcccccggagacagaccagcgcgcgcgccccgggccgcctccccccagcgcgcgtccgccccggggctcgcgccgccgccgccgccgccgccgcgcgcgcgcagctcaagtaaaggaggaaaaaaaaaagggggaaaaatagaaagcggcggcggctgcagcagcgatccgccgccggactgggccaagccgggcggcggccgcgcgagccggcgatccagggcactggcggcggccagccagggcgggccgtgttcaaaaaaaaaagtcgcggcggcggcggctgctcagggaaggaggcctgagggccgcgtgcagcgggcgggcagctgggtgggctgggggcggccgcgcggcgtcccggagcctcgggccgcccggagccggcgggcgggcggaggcggaggcggcggcggctgcagcggctgcaggagcggcggcggctgcggcggcggcggcggcatctcctcctcacatgaccccactgtttgtccccgtgatcagcgcgagcggctcccgtatctcctccgtcccctcctgccgcgcggcgtgagcgccgggctcggggcccccccggccgcccgccccctcccctccctccctcccctcccctcccctcccccccgggccccgcgccccccccgcccccgccccccccatggacatgctggacccgggtctggatcccgctgcctcggccaccgctgctgccgccgccaggtaagatccccggcccggccgtgcccccgcgccccggccccggccccggccccgcggcctgcaggccggggccgccatgatcccgagcggccgcgggcccggctcaaaatggaggccgccggcgcgggggggacctggcgcctcccgcccccggcccccggcctcggcggcgcccccggcctcaggcgcggccgggtgggactggggccctgcagctgggcgcgggggcgggggcgcgggcgcgggccgcgctgaccctgctccctcctgtgcccctggcagccacgacaagggacccgaggcggaggagggcgtcgagctgcaggaaggtgagtgcttgccgggccggccgcgcccggggagggctgggggcgctcggcgcggccctgaccgtgccccgaccctcctcggccccaggcggggacggcccaggagcggaggagcagacagcggtggccatcaccagcgtccagcaggcggcgttcggcgaccacaacatccagtaccagttccgcacagagacaaatggaggacaggtgagcggcgggccgcgagggcgaacgggcgggcgggcgggcgcgccgggaaggctcggacctggccccagcgccggcctcgccgctctgccgccccctgcaggtgacataccgcgtagtccaggtgactgatggtcagctggacggccagggcgacacagctggcgccgtcagcgtcgtgtccaccgctgccttcgcgggggggcagcaggctgtgacccaggtgggtgtggacggggcagcccagcgcccgggccccgccgctgcctctgtgcccccaggtcctgcagcgcccttcccgctggtaggtgccctgccacccctgggtgggggggggagggagtggagaggggacactggctctgctcttggggagccccgggggtggggcaggtgtcgcccagcggatgctgccttcaggcctcaggctgcatggggccagatccctgttgtgcaccgtgaaacctggggacagtgctcttggaatttttttttcccgcaaaatgggaatgatgtgtcttaagaggaaagtttcttagagtgcgaaacggatttgctcagcaagtgatcgctgacctcccgccatgttccagggctgtttgaaacacaggacagaatgctacacgcagaaggagtccccactcctgttaattgcagagaatgcagtaaaccccaagcacagcaatgaggggacgggatggaggaacagagaaagctaagggtagcctctgccctcctactccccaggctgtgatccaaaatcccttcagcaatggtggcagtccggcggccgaggctgtcagcggggaggcacgatttgcctatttcccagcgtccagtgtgggagatactacggctgtgtccgtacagaccacagaccagagcttgcaggctggaggtgaggagtagaagtcagattggcaggtgggggaggcaacgggcccagcagggagggaagcccccccagccagttctgacttcaccctgccttgccactaaccccccactctccctgcaggccagttctacgtcatgatgacgccccaggatgtgcttcagacaggaacacagaggacgatcgccccccggacacacccttactctccgtatgtgcaggggacacctggagggcctggtgttgaaatggaaggaagaggggtttctggagtagaagctgggcagttagcatgaagtgggcacatggtgtaatgttttttttctttgcctgtttctgctgctctagtgcacataaagtatcatgtcttttgtttttgcagatggatttaccttgcaaagataattttcaaatctaatacttagcagatgcttgggcaaacagctctgcgataatacatgccccctttttttttcctcctcttgtagaaaaattgatggaaccagaacaccccgagatgagaggagaagagcccagcacaacgaaggtgaggacaaggtgtggctccgggtccccctgaccaccaccctcacaggctcagccagccctggagtgtggagtgacagagagagaagccactcctgggcaggccacaagtgctccagagggctttgctggacgctgtaaaggtagaaagtgagcaacgaggggagagtacagtgtcagaagtagagggacagggagtgtgaattggaactggccatttgttgacccggctggtgatcttgaattcatggcccacatctaagatggtggacttcacactcccatacggattgcctgccccacttgaaaaatggggctgaccgggctcacgtgggctgacctttccacgtggcagctgtcatgctcacatcccgcactcccatgcctgcctggcctccagaagtaggtctgttcccccagggagcacatctgagggagaaactgcatgaagttctgcctctggctacctaaggccggagcatcctgccctttccagaaacaccaggtctcacctcaggtcatttggccttcagcactgtcccgccccgcctgtcagtagccactgcagtgggcacagcactgtgcaagtgccaggagagtgcttacacccaaacaaccatcattcaacaaatatttactgcccgtgggttctgggctgagcggcacaggccctgtgccaggtctggagtctggcctggagcgtcagggaggctcaaaggcctgagggcttatgtctcatgggtctcatgggacattgatggggggtgggctggggtgacgcttccctagggagaggggagtgtgggtcaggttactttgtggggtgctggtttggttgtgggagaagttccatttagaatgcctcaggagggaagatcgggaaggcctcgaatgcccgagtgaggggctgaatgctgagtcctaaaggtggtgatgggactggggtctgtggcccaggtagttgtgttctgagcagctcctccctgagttcaggcgttcattcagcgcgtgcatactacgaccagccccccttttgcgtcctcagatatggcaatgcagcagatgataggacagacaaggtctcagctctctgtgcgcgttctggtgggagagatgggagtcacacagccgcatcaggcagtgcaggcagtcacaggcaggagaggaaagctggggaagaaggtggcgggtgatggcggcatggtagtgtgctctgaagggctcttcgagaggtgacattgaagcagatccctgaagcgacctgagggaaggggcctgttgagaacctcaggagagtcccgggcagagggaagagctagaacacaggccaggccctgagccagggccgccatggtgtgtctgcagaagagcagaattcaggaaaggaaagaggaagttggcgcagtggagggggctgcccaggccagatggtggaggaccttggaagaagtccccagtgtggctgtctgggctcctgtggttttattccagggtgatgagaagccagcagaggggtttgggttgtggaggctgttggcaagagtggtgggaaggggctgggaggtaggagaccatacgactgtcaggcctgagacagggcaggggttgggggaaatgtggggaggactccaaggctggagaataagggtttcgtgctgaactcccctccatgcttggaagggaaggggtgcatctgagcttggttttgagatgcagtgagtttgaggggcccccagagcagccccagccccacgacttacctgtggtggggcgtcagggtggttcttaatctccgtacctgtcttccctctgtgaaatggtggaagcacagccgccccgggcacctggtggggatgcagtgagtcttggtggccacacagtaaggcgaagagaggactcagaaccctcccaccccactctcacccccgcctctcccttagttaatctgactccaggcagccttgaaactttctcaccctgtgaagcagtcttcatcacctgcccacttctccagctccgtcctgtctccgctttcctgacttgcagagcatctgccccaatctgctcatcctcccagtaccctcagccatctggctcatggctctaccaaaacagctccacttccggtcacccgtggtgaccccattgccacatccactggcctcctttgctgtctgggctccaagcatctgatgctgcctgtttccctctgttcctttctggaatcttcctttctcctccatcctctctgattctcctgtgatctttgcctttcctaccccactgttaacagtgaaatttccagggctgtcccagttccaagtgagtagatgggggtgccggggaatctgtgttttccatcagctcttcaggtgatttgtcatagtggacaagcttgagaaactgctttggctgcgagtgtttctttttttttgagaagggggtctcactctgtcacccaggctggagtacagtggcacaatcacagctcactgcagccttgacctcccaggctcaagcgatcctcacacctcaggcttctgagtggctgggaccacaggcaggcgtcatcacatggggtaatttttttttatctgtagagtggaggtcttgctatgctgcccaggctcgtcttgaacttctggcctcaggcagtcctccggcctcggctacaggcctgagctgccacacccagtcttgctggtgtttcataaggtccggcccctcccgtcggcctcaggtgtatgacttgtgaggcccagcgatgggctcggaagctcttggtcagtatcccccaaactctgttcccccttgtaggtgttcctcttttttctttgctgcagaagagtgtgtgactcacaaaaagttgaggactgttccttgatgtcctcccaggcttcgcccaccacctggctcctggtaatgcaaggaactgtgtttccatccattcccttcctttcactgcaactccagccccacgttttgaactacctattcgagatttctgtctctggacatccctgtaatgcctcaaactcaactcgcccaaaagagaatgtgccatctcccgtctccaaaggctttcatgcaaccttcttctttgcagagcagcaaaagctacccctgtcacagctgcccaagccagaaactaagaccagagccgctttcaactctgccctcttcttcccttatggccacaaaccccaagtttctcttctgtggtgatttcagatccgcttctctcacttctttttccctccttcccaccacttcttggtactgcaggagcttatcccagagtcacagactcaaatgcctgcaggggcctgagggagggaggtgcacttggcatctcaggaaggggtgtgtggctgggtgtggtggctcccgcccggaatcccagcacttttgggattacattttggccaagacggacggatcacttgagcccaggagtttgagaccatcctaggcaatgtgacaaaaccctgtctctaccaaaaaaattaaaaattagccaggcctggtggtacatgcctgtaacagtcccagctacttgggaacctgtggtgggaagatggcttgagtccgggagacagaggttgcagtgagctgagattaccctccagcctgagcaacagacccagaccttgtgtcagaaaaagataggaaaggttgtggggggcccccagtgatctggggcatgtgtgcgctgcctgaagggtggcccttgcccagtgccttccccttgctgccctgtcagaatctagggccactgttgccagaaactctgagaagctagaaatcgagacttatgtgaaatctgatttttaggtgccagattagattgctttttccgtttcattgatttctactcttaatgttactaattcatgcttctactcacttggttttttgtttgtttgttgttttgttttgagatggaatctcgctctgtcacagtggcgcaatctcagcttactacaacctctgcctccccggttcaagtgattctcctgcctcagtctcccaagtagctgggactacaggtgcccgctgccacacctagctagtttttgtatttttggtagagacggggtttcaccatgttggccaggctggtctcgaactcctggcctcaggttatccacctgcctcagcctcccaaagtgctgggattacaggagtgagccactgcacccggccccttctactcactttggattcaatttgctaggtttcatgctttagcttccctggcacaccccaaccccagctttttaaggtaattctttttttttttttttttccaattttctactaaaatctttattttacaggattaatgtttcacagcagggattgagatgattcttaacctttctctttgcttaacaacatttagagttgccagttcactccagcatcactttagctacatcccactgggatatgttgtttttgttatcattcagtttaaagtgttttccaattttccttgtgatttcttctttgacctttctgttatttggaggcaggttgcttaatttccaaatatttgtgggtttttcagatatctttttgttattgatttttaatttagttctgttatggtcagagaacatactctgtatgatttcagttccttgaaattcgatgagacttacccgacgggcccgaatgtgtcctagcttggcggaagcttctggggcattgacgaggacaggtgtctgctgctgtcaggcagaatgtccccccaggtcagtgaggtcaggctggttgagtgttcaggctttctattctgatttttgttgttgttgtttacttgttccaccaatcaatgagaaagatgtccatgtctctcactatatttgtggatttgtccatttcttccttcagtcctggcaggtttcgcttctgaattttctcttttttttttttttttttttgagacagagtctcgctctgtcacccaagctggtgtgcaatgatgtggtctcggctcactacaacctccacctcttgggttcaagcaattctcgtgcttcagcctcccaagtcgctgggattataggcatgcactgctatgcctggctaatttttgcatttttagtagagccggggtttcgccatgttggccaggctggtctcaaactcctggcctcatgtgatccaccctcccaaagtgctgggattacaggcgtgagccaccccacccagcttctgaattttaagtttcctatggagtaactgaagtgcttctgtggaatgaacgtggccttggtcctaatgggtcttcctgtatttcaaatgtgccatgatggtcttccgaagccacaggctggacagcattaccgcctgctaatgtcagggcctggattcaagggcctgggactctggaggaggaggagatgcggtcctgacctgcgagcagagcacacaaggccttgacaaccgatctttacaaccttttcccacccctgcataccctgaaatggttttcaggccaccatttctgggatcttcccagctgcctgccttagagtctttctctcagaaaccagcccgaatgtttcctggatctctgaggattcatcccacccccattcccatgcagaggccatggctcggcgcctggcgttcccgaggcactttgtaccatcttcagtgatgacacgaatgcaatggggttagtgccacttgcccacagtggtgctgcgagtgcccatggggcgcaccggggctgcttccaccctggaccccagcctggcggagggcctggcacatagtagggcggggagtaggtgtgtaagaagtaagcttgctctggagaggatgtacctgcagccggcgcccagctctcgagaggactgtgggagggcagaggctgaaacgaggccgcctgccgagttcctccacagacccctgggcgaggagcgctctgctggggactgcgccagcggtgcctccaggcctggactctcagctccgctgctgcttttggccagagttcccaaaggcgggtgtggttgtctttggtgggaaggttcagcgcaccgcgatagtaataggggagcaagcactcgctgagcccagtgcagggcctggaccgtgctccatagcaagcactgatcttgggctattggttttggaggaaagagggagcacaaggatggaaggggccagggaagagaggtcacggtgggagaaggagagtccgcatccatcggagggtttgtcactcaggcctgagtgggaggcactggaggcagggagaggccagtcagcagcatgcggccacagcccagagaagccagaggggtttgctggtgggtgggccccagccttttcaagggaacggcaggtctggggagctgccgatctcggggtgtgagggtaacgggcaggctgtggcccacccctccttctcaggctcactggacccctgaccggtttcatcaccattatccaaggctttgaaaagaccccctggccttcctgccacatgtgccctagctatagggcttcgttcccctccacaaatggtgcagacagcatgagccaccctggcagggggctgggggtccgtggggtaggagttgggggtagctgagcgttctttcctgtccccacggtgcctggtgctggggcttggcagccagggttgggacagcctggctttagcaggtcctgagtcaggggtctcaggctccgcagcacacagtccccaggcaggtgtcaggatgggatgtggccagagaaaggcatgtgctctgtctggggatagctgccacccagctgacacagttggcatgagattgtggagttttatggagtaaaatcacaaatctgggttttttaagtaaaaccttctatgagttgccatctctggccttcaacataggatttgggtctttcctgggtgagctggtgctttgtgggccaggccctgggagctgcaagtaccagttgggatctgccattgccctgtggaaggattttaagcaggggtgaaacatggtcagacttggatttagagatgaggaaaaaaaacaaaatcacggtgccagagtctctggggagactggagaatgcagtgcaggggccgcaggagccaaaaaggggcactggtcctgcgaagagtggctctgtccatccctgccttccagtatgtgcccactgtgaccagagctccatttctcaaaagaagccagtgatgccaattaccatgagaaatttccttatttttaactgtcgattaaaatttgtacaagtatggtggggcaggcctgcaaaatgatctccaagtgcctggcctttgatgcccgtcctaaaagcatgtgtggcactggagggcccacgtttctttgttcctcttgagaagctggggtgggggccggctgggctcagggtgcggcccctcacttcccagggctgtggtctcggtggggcctgcactgttcctgggtgtccttgggctgagcctctgccctgtgaggacggccgctcaggcatgatccgtcagcgaagccgtggctgtgactctgttttccgcagtggagcggaggcggagggacaagatcaacaactggatcgtccagctttcgaaaatcattccagactgtaacgcagacaacagcaagacgggagcggtgagcaccccggaccctcagtgtctgcggtggtcccggcccccgacccttgcatgcagaaagtccaacagccatggggctcgggagtcatccctggggtggaggccggtgggcggtgcctgccctaaggctcctggtcccctcgccccccagagtaaaggagggatcctgtccaaggcctgcgattacatccgggagttgcgccagaccaaccagcgcatgcaggagaccttcaaagaggccgagcggctgcagatggacaacgagctcctgaggcagcaggtgggtgcggggcctggagcgggtcagggcccaggagccccagatgcaaggcgctggccctcagctcccttgacctccgtcgtgtccgccagatcgaggagctgaagaatgagaacgccctgcttcgagcccagctgcagcagcacaacctggagatggtgggcgagggcacccggcagtgacgcccgccaccaccacgcagccgccgccgcccacgccggcctctgctgcccccttccccagcccttagcacagagagggacacatgcccctcccccagctgcgtttttttatagtagatttttaacaaaaaacggggagaaataatgcatttctgtggatacagtgcccaccgccctcctccacttggaaacggtatcctccctgcccatccgtctgtctgtcgcccttctcccggccctcactaagccccggcacttctagtggtctcacctggaggcaagagggaggggacagaggccctgccacgtcccgctgcctcctgctctctggaggtactgagacagggtgctgatgggaaggaggggagcctttggggggccacccggggcctggacctatgcagggaggccacgtcccaccccacctcttgtttctgggtccctgctcccctttgggggtgtgtgtgtgtgttttaattttctttatggaaaaattgacaaaaaaaaaatagagagagaggtatttaactgcaataaactggccccatgtggcccccgccttgtctgcttgtgtgtttgtccatctcaggagtggggagggggcctggggtctgcagagctccacgaggcatggttctgctgttgtgcacatggctgtgcatggtccctgccagctgcaccacccattacccagtggttggttggatggatggaggaattaaggaatgaatgtcccctttgaggccctagacgtgcatgagggtgtggggagctggggtcaaggacatgtcccatgttggaggagaggcaggggtctccgtgtcaacagttcctgaaaacacaaccagcccctggccctgccctgctgggccaaagccctcccctctgcaccagccaatagtggggcctggccttgagcccctcacccccagggagggcagatggccagggcgccaagcttggcccgtcagcctgtcgccttgcaccaaggctctggcgcctgtgctgtgacccctgcccctgctgatgatgaaacctgtcctcagctgagatgcagcgatgcctggtagggctgggggctgctcctgtgtctccccaggtgagcacacccctattcactgggccctgcttcagcctgcagcacccttcaactcccaggagctgggcttgccactctgctcaccttgtggagctccatctgcctttcctccccaattcccccactccctgcactcgtctcttcccacaagagccctgtctccttttcctagctattcccatctgaggccatctttattcatttagtttttagagacagggtttcactctcacccaggctggggtgcagtggcacacaatcacggctcactgcagccttgaccaactacaggtgcgtagcaccacagccaagtttttgtatagatggggtctcgctttgttacccaggctgtgacaagaggagcctcccacgtggtgtggatgaggaggcagatggcagggcctgtgcatttctgtgcttgagtgggccttgaaagtggttcagcaaccaggaagaagtgttcattcctcgacaacaacatccccgggctctggtgacttggctgacactggatggccctggaatgaaaaaggcaaagaggcaaaatgtgcaagggcccatctggaaccaaggtttgttgatcccctgggccgtgtgcaccctgagctgggcctggtagtggaaaggaatgaaggcactgcagtcaggcagcctgggttcatcccccagctagtggtgtcctaaggaaccggctccccaaaaacatccctggcttgtagtgcttgccaatttctgggtgtcaagactcccactgctgctgatttcaggataccagcatgatgccactgaatgcagagtttcgagatgtgcatggtctgctatgttgagccaggtctagcataccgctgtgccctgctgtgttttaggggagatggggaaacctggtgggtaagagcaaaagccctggagtcaggctgtccaggctagaatctcagctctgcctctggctgagcaagcttgggccatgccctgatctctgccttcagtgccttttctgtaaagtgaaggaaatgagtgtccgacggggaggaggttcctaaaagggagcagggtctggggagcccaggcctctggggttgggtgactgagaaggcagcccctgaatacagagcagagctgaaggtggggcagtaagtgctgctgggagaacaggcagcacaggctgagttggtgcagaagtgagtcaacatatgtgccatcgtataaaatgtactcatcggactgtagatgttagctattactattactgctattttatgttttatagacagggtctcactctgtcacccaggctggagtgcagtcacacaatcatagctcactgcaacctcagcctcctgggcttaagcgatctgcctcagcctcccaagtagctgggactacagatgtgtgccaccacgcctggctaaatttgtttaaaattttttttgtagagatggggtctccctatgttgcccaggctagtcttgaacttctgggctcaagcgaccctcctgccttggcctcccaaattgctgggattacaggcataagccactgtgctgggccatattactgctgtcatttatggccaaaagtttgctcaaacattttccagttaccagagccacatctcaagggtctgacactgggaaaacaccacgtgcggatcgggcacacgctgatgcttgccctgctcagggctatctagtgttccctgccagaacctatgcacgtgtggtgagagcttaaagcaatggatgcttcccccaacatgccagacactcctgaggagcctggcggctgctggccatgccccgtgtgcatgtaggcgatggggaagtgagtggaggagagcggaaccttgattctgctcatcaaactgcttaaccgctgaagcaaaagggggaacttttttcccgatcagcagaatgacatcgtgatggggaaagggctccccagatggctggtgagcagtgtgtgtctgtgaccccgtctgccccaccccctgaacacacctctgccggctgagggtgacacaaccctgttccctgtcgctctgttcccgcttatctctcccgccttttcggcgccaccaccttcttggaaatgagacagagcaaaggggagggggctcagaccaccgcctcccctggcaggccccataaaagcgactgtcactcggtcccagacaccagagcaagctcaagacccagcagtgggacagccagacagacggcacgatggcactgagctcccagatctgggccgcttgcctcctgctcctcctcctcctcgccagcctgaccagtggctctgttttcccacaacaggtgagagcccagtggcctgggtccttagcagggcagcagggatgggagagccaggcctcagcctagggcactggagacacccgagcactgagcagagctcaggacgtctcaggagtactggcagctgaacaggaaccaggacaggcacggtggctcatgcctgtaatcccagcactttgggaggttgaggcaggcagcccacttgaggtcagtttgagaccagcctggccaacatggtaaaaccccgtctctactaaaaatacaaaagttagccaggcttggtggcaggtgcctgtaatcccagctactcgggagactgaggcaggagaattgcttgaacccgcaaggtggaggttgcacagtgagctgagattgcaccactgcactccagcctggcaacagagcaagactccatctccaaaaaagaacagaaatcaatgaagcaccgagtgacagggactggaaggtcctaattccatgggtatttacggaacccctacgccgtgtggagtcttattctagacagtggggacgaggccatgaacaaggtagatgagagaggagatttctccatcctggtcagggaatttgttaaagactgatgaaaacatgaataaataattgtgtctagtacattctattcgtgaatctcataacagacagtggtagagtgaccgtgacccattcgccacacagtagagtcacttttttggtttgttttttagagacagggtcttcctctgttgctgaggctggagtgcagtggtgcagtcatagttcactgcagcctcaacctcctgtgctcaagcaatcctcccacctcagcgtcccaagtagctgggacagcaggcacatgccacgggttgggggaccacaggcatggtcaaggggctggcagtcaagcaagtgtttcatgagaaagtgacagttgaccttcgtcttggagggtgagagatggaggcagcaaagacctaaggagaggacaagccagcatagcccagggtcaggctgaacaagaggagatggtgggacttggggataaggctgaggggtgggcagtccctaagtcttgtgggcaaccatgcagacactgatttttccttggaataaagaggaagcccccataagcttttttttttttttctgagatagggtctcgctctgtcgttcaggctggtgtgcagtggcatcatctgggctcactgcaacctccgcctcccgggttcaagcaattctcctgcctcagcttcccgagcagctgggattacaggcggctgccaccacgcccggctaatttttgtttttttagtagagacagggtttcaccatgttggccagactggtcttgaactcctgacctcaggtgattctcccacctcggcttcccaaagtgctgggattacaggcgtgagccactgcgcccagcctcctgtaggtttttaaaatggagaaaaccacaatctcactggccatgttttaaaaaacttaatctgccagtcaggcaccatggctcacacctgtaatcccagagttttgggaggccaaggtaggaagatcagttgagcccaggagttcaagaccagcttgggcaacacaaccagaccccacctctacaaaaaattaaaaaattagccgggtgtggtggcgtgcacctgctgtcccagctactcgggaagctgaggcgggagcatcgcttgagcacaggaggtcaaggctgcagggagctatgactgtgccactgcactctggcctgggcaacagaggaagactctgtctaaaaaacaaacaaaaaaagtgactctgctgtgtggcaaatggattgaggggcaagaatgcagggaggtgtgttaggaggctggcactggcatccaggcaggggaaggtgatatcccaaagaagagtagcagctgtggaaagaggaggaggcggatctgggaggtttttttttttaggaaaagccgcccatgggaaggtgagcagaagcaagaaagcaaggcccctcctaagagtccatttgagctctgggtttaaaccacttggagaggagcaggttgccgggagccagtctcagaggtccactgggccccctgccatcctctgcacccccttctgctttcacagacgggacaacttgcagagctgcaaccccaggacagagctggagccagggccagctggatggtgagcgcaacagtgatgcctttcctagccccctgctccctccccatgctaaggccggttccctgctcacattcccttccttcccacagcccatgttccagaggcgaaggaggcgagacacccacttccccatctgcattttctgctgcggctgctgtcatcgatcaaagtgtgggatgtgctgcaagacgtagaacctacctgccctgcccccgtcccctcccttccttatttattcctgctgccccagaacataggtcttggaataaaatggctggttcttttgttttccaaaccagagtgtctgttgtcctttctctctgccgagtgtctgtgctaagagcttgtcctgaccctgccttgcaagcaccagtgcttggtgggtcatgtggggctggtgtgtcctggaggttgccaggaaagttggtgaagaaaatttgtttctgttctcccccttcatgttgcaataataggggatgaaagttaatgtttcctctccttgagatcttcctaaaacagctgtagaaatcagtgcctgtaaggcaagcttgtccaacctggaggccacatgcagccctggatggctttgaatgcacccaacacaaatttgtagtttcttaaggcattatgagatttttccgcaatttttttttttctcatcagctgtcattagtgttagtgtgttttatgtgtggcccaagacaattcttccagtgtggcccagggaagccaaaacattggacactgctataaaggttctcaaagtaagatccagggactccttttgtagggctcctgaaggtggaaactactaagactttttttttcctttttttttccttttttttctttcttttttttttttttttgaggcagagtctctctgtgtcacccaggctggagggcagtggcatgatcttggctcactgcaacctccacctcccaggttcaagcgattcccctgcctcagcctcctgaatagctgggactacaggcacgtgccaccacacctggctaatttttgtatttttagtagaggtggggttttgccatgttgtccaggctggtctcgaactcctgacctcaagtgatccacccgtctcagtctcccaaagtgctgagattacaggtgtgagccaccacgcccggcctacaaagatgtttatttgcctttttcaccctggttctctcatgagtatacaatggagtttccaggaggctctgcgacacctgttggcatcatcaccagatggctaatggattgtgtgctggtgtatctcacgcttttaaatgtcccagtttctagcccggtgcagttgcaccagccctgctactcgggaggctgaggcaggaggataatttaagactgggagttccagaagaagacctggtgtcaaaaaaaaaaaaaatggggcaacgaaaatgagagcaatacagctttcaagaatgggaggggccaggggtggtgattcatgcctacagcactttgggtggctgaggcaggcagatcacttgaggtcaggagttcaagaccagcctggccaacatggtgaaacaccgtctctacaaaaattagccaggcatggtggcatgtgcctgtaatcccagctagtcaggaggctgagtcaggagaatcacttgaaccctggaggtggaggttacagtgagccaagacaacactgctgcactccagcctgggcgacggagtgagaccctgtctccagaaaaaaaaaaaaagaagaatgggcaggaactcagttccttgtggaggtgaactatattcctatatgtttcacgtgcaaagtgtgtccttcctgagagaatacaacttaagatgctcctgtgtaacaatcccccatacctcgctcatctgctatacctggatggcctctgaaggccatgggcctcacaccttttggtcttaggacccctttacattctgagaaattattgaggactccaaaaagctcttgataaagtgggctatatctctagttgcctgatgtattagaaactgaaactgggaaaatatttttactgtttatttatttatttttgagacagggtctcactctgtcgcccaggctggagtgcagtggcgcgatctcagctcactgcaaactccacctcccagtttcaagcggttctcctgccttggcctcctgagtagctggaactacaggcgcccgccaccatgcctggctaattttcatatttttagtagagacagggtttcaccgtgttggccaagctggtcttaaacgcctaacctcaagtgatccacccgcctcagccactcaaaatgctgtgattacaggtgggcctggcctgcccacatttgatagaaacagacataggggctgttatttcactgtcttcttagctcccaggaagcaacagctctcacttgatggtaaagggcattggtcattcggcctcaatgttgggtgtgggcagggagtgggaaggcccaggctgggcgggagagggctccaagacacggctgccacacccaaggcaggtaaacctgactagaacttctgattttgtcaagagaaggtgggaattcctatttttattagagatttcttgctttgacagtattggcaactgagcaaagcaatttgtcttttaacatcaacattctgtgagccaaacgaagcccagctgggcgccagatcagtctggggcaccatcaatgtctgccttcgctttggaatccacagaggcttgtcctctgggaggggaggtttcctgaatgaaaactgaagggatagggagaggggagttgtggtgagcttggcctcttattagctgtaacatcttgcatgcatcttcttcatatccggagctccacctcctcatctgtattttttattttatttttttagtctgggtcttgctccatagcccaggctgaagtgcagtggtgtgatcatggctcactgcagtcttgatctcccgggctcaagcgatcctcccacctctgcctcctgagtagctgggaccgcaggtgcctatcaccacgccccgctaaagttttgtattttgtgtagagacgtggatctggctgtgttgcccaggcgggtctcaaactcatggcttcaaatgatcctcccacttcagcctcccaaaatgctgggactacagttgtgagccaccatgcctggcctctccttacctttaaaagaacagaggcactgggcgtggtggctcacgctgtaatcccagcactttgggaggccaaggcgggtggatcacctgaggtcaggagtttgagaccagcctgaccaacatggtgaaaccccgtctctactgaaaatacaaaaattagccaggcgtgttggcgcacacctataatctcagctactctggaggctgaggcaggagaatcgcttgaacccaggaagcagaggttgcagtgaaccaagatcatgccactgcactccagcctgggtgacagaacaagactccatctcaaaaaaaaaaaaaaaaaacaaaaaaggaacagaagctaagtccatacaggacttagcttaactggctctagagctgctcaaccaagggaatgagtgtgaaattgctttggaaactgtccaatgcttcctcaatgtaaaggattcatattgacaggagagggtagaggcctccctcctggcaggtgggaaacctgaaatcaggaattacacttaatgacacggggtgctcttctctcctgagcaagcagttctctggggtggtcctagagagatgggagaacatgtaaagcagagatactcaaatttcagcgtgctcaaaatctcctggagggcctgcaaaaatgcagatgggtccaggctcagtggctcaagcctgtaatcccagcactttaggaagctgaggctggaggatcacttgaagccaggagttcgagaccagcctggccaacatggtgaaagcccgtctctactaaaaatacaaaaattagctgggtgtggtggtgcacacgtgtagtcccagctactcgggaggttgaggcacgagaattgcttgaacctgggaggcagaagctgaggtgagctgagaccttgccactgcactctagcctgggtgacagaatgagactctgtctcaaaaaaaattaaataaataaaaataaaatgcagatgaggctgggcgtggtggagcatgcctataatcccagtggtttacgaggctgagacgggaggattacttgaggccaggaattcaaggctgcagtgacctatgatggcaccactgcactgcagcctgggtgacacagtgagacgatgtctgtaaaacaaataaacaaataaactgcagatagctgggcctccagaatttctgattccacaggtgcaaggcggggcccttgaccttgcattttgagcaagctgcagtcctgtggaggactggttgtgaagctgacaccattgtctgagggcagcaaaggctcttggatggattgagcctcagctcccatctatgagagctttaagctttaagtgagagctccccatggccgagagcttcattctgaattcctgctgctaggaattcaaaactcacattgaagtcctaacgcctagtagctcagaatgtgaccttagttggaggcagggtcttcacagaggtaatcaagttaaaatgagacgggagaatcctaatccaatataactggtttcctaaatctgacagggtacagtgactcacacctgtaatcccagcagtttgggaggccaacacaggaggactgcttgagatcaggaattcaagaccagcctgggcaatatagtgagaccctgtctctagcaaaaaaaaaaaaaaaaaaaaaagtgccagtagtcccagttactattgagaggctgaagcaagagagtcgcttgaatctggagggtggaggtggcagtaaggtatgattgcaccactgcattccagcctaaatgacaaagcaatactatgtctcaaacataaataaataaataaataaataaataaataaataaataaacggcaaatctgggcaggggtgaatacagggggaagggaatgtgaagatgaagatgccatacagagaaaggcccggaacagatcctcacacccctcagaaggaaccaacactgccagcacttgatcttgttgatcttggaattcaagctcaattctggcagggttttttgtttgtttgtttgtttgtttgtttgagtcggagtcttgctctgttgcccagcctggagtgcagtggcgcaatctccgctcactgccagccccgcctcccgggttcacgccattctcctgcctcagcctcctgagtagctgggactacaggcgcctgccaccatgcccggctaattttttgtatttttagtagagacagggtttcaccgtgttagccatgatggtctcgatctcctgacctcgtgatctgcccgccttggcctcccaaagcactgggagtacaggtgtgagccaccgtgcatggcctcaattccggtttttaagccacccagtttgtgaaactttgttgtaacagccctggaaaactgatacacctgctctctcgtaaaagatcagctgatacggcagcaccggccactggatctgcgggtcagttgtccccttagacagggcacctgcccgccagtcacaggtcctgtcacccagccccttcctctcatgggctccagccgcctcgctcccacaggtctcctggagacccgagttgctgatgtcagcgactattgcgagtgctcctgtgggacactgtcctctccccagcaacagccttcagttcacacccagggaggagatggagccccacactgcaccagcacacgactccagctccaactaggtgggtgttgatgctgaaggctgtgacatgcaaataccccccaggatctccttgtcaccccgaccaccaccaccaaagcccaggcaccaggcccctctcttctccaggacccaggcattcaagccccgcccgactctcaatggtcctttgtcccggactgggaaaggcacgggcagagtctgacatcatgaagcctggggtgggggtgggactccccctccccctccaactcccccccagccccacaacgcttctctccctggtctgagggatttccccgcccctcaccccctgggttctcccttgagagcgaggaccccccctccccactgctctggcctgaaggaggacaggagatgtcccagtgaggctgaacagctcatggtgaaatcactgctgcactttgtcacgccacctccagctgccccgagcccccacccaccttgcaaaagtcatgaccaaggggtggaatctgcactcagagggtccttgcccaacttggtcagcacagtcctatgtgcaccaagcactgccccggggacagaagggtgcacatgacagacagagaggcagataggtttctggtgagcccctgcctctgagagctcctgggttagtgggaggcagaggcgggcagacctagggtgcacacgggccagcctgccaaggctacagaaggaaaggacagcattgcaatggaggggcctggctgatgggcgaagatgggaaagcttcccagggaagcggcacccaggctgctgagcctacaggatgggtgaacggcagccagtgccagagtggggagtgctatggggtggggactgctttccaggaagaatgagcagcaggtgcacaggccttgagtctgaaggtgccctggggctctggggaacacattcaaccacccacactgtttattaagctcaactgcctgccaggagcttgtctacgagcaaggatggattgagaatatccaagacgaagcttctggcctggtggaggtcacgttctcatgaaaggagttggtgaacacggaaggtcatttcagatggcaagaggaggtgacactgacgttgagggtggaaaggacctgtctcctcctgctgcccacctaatgttgccaccaagattccctgaggacaatgcctctgtccctcagcctgggacttccaaagagattagactgcccccccacccccgggacccagaatcagggtgtacagggatggaagatggggagagagcaaggcagccactcccgacccctccaggaaagagctaggagaacccaggcgtcaggctgcccagtccgagccccgtggtgacaagggcccctttgtgcccccctcccccgggggtagggaggagctgggccctggaggcaggcggcccctggcacccagggggaggggaggggctggcaagtgggggcctagaccctggaaggcaggggactgcgagctgggctggcggagcagaggtgcagaagcaactgagtccaagtgagtatggtggcagggaggccagggcaaggggagcagggcaccggggcagtggcacccagacgtgagcagggtcaggtgctctgggtgagggagcatcgctgtgcaccgctactgatttaggatgcaggagtgtgtggcttggggctgctttggggatgggctcggaccatcgctggggcagcgatggggctctgggaagaaaccacagagagaaaaaacaaagggccccccctcagcaccccttgtgggtgaagattttgcaggagaggtttccttggggttcccgagtgcggggcagatggggtggaggaggtctgcatctggccgaagaatggaaggatgtccaggtgatcagacacctgcaggctgcaatctgggaggtggatgggggcagtgggctgttagtgactgcattctagcacctgggcacatagcaggtgtgtgtgtgtgtgtgtgtgcgtgtgcgtgcacacacatggctgcccatgcaccttcctctgtaagcctcagtcgacttttcttcattaatccccactaaggacactttttatttttcgttacttttttttttttaagagacgggactctcactatattgcccaggctggtctcaaacttctgggcacaagagattctcccaacttggccttccaaagtgctgggtttacaggcgtgagccactgcgcccggccccaactacagaaactttttagatgcatttgtcctcatcccatccttcccttggcattttaatccaacagatc

SEQ ID NO: 117 - DNA, 303 bp, Homo sapiens
  misc_feature (1)...(303): n=a,t,g or c
gatccagcggcagtgacagaatccaaagagggaacagaggcatcagcatcgaaggggctggagaagaaagagaaatgatgcagctggtgcccgagcctctcagggccagaccagacagatgggggctgggcccacacaggcgtgcaccgggtagagngcacaggtaggccaaggggnagctcccaggacagggcaagggggcagcanggatacctgcnagccagggnctctntggcctntnttttcctantccntttttttggcccttcttttttntntgccgtacancntgcaggcaaaagn

SEQ ID NO: 118 - DNA, 466 bp, Homo sapiens
  misc_feature (1)...(466): n=a,t,g or c
gatcccatggctttctttactgggctctggggccccttcacctgtgtaagcagagtgctgagccatcactgtttcagcaccactgggagtctgagtgcgattcagaagatnacgcgggtacgagtggtggacaacagtgccctggggaacagcccataccatcgggctcctcgctncatccatgtctataagaagaatggagtgggcaaggtgggcgaccagatactactggccatcaagggacagaagaaaaaggcgctcattgtggggcactgcatgcctggcccccgaatgacccccagatttgactncaacancgtggtcctcattgaggncaacggggaaccctntnggngacangtattnaagacacngtncccacctaggctgtggnagggtgaagggcgagttttcccaagntggtgggccttngttnaganctttgtgttgngtttggnncnngnta

SEQ ID NO: 119 - DNA, 18596 bp, Homo sapiens
cctgtagtcccagctacgcgagaggctgaggcagcagaattacttgaacccaggaggcggaggttgcagtgagccgagatcgcgccactgcactccagcctgggtgagagagcgagactctgtctcaaaaaaaaaaaaaaaagaccgccagggctcaaacaaaaaacctcggaaaagccctggcggtcttttttttttttttttttttttttttttgggacagtcttgctctgtcgcccaggctggagtacaatggtcggatcttggctcactgcaacctctgcctcccaggttcaagcaattcttctgcctcagcctcccaagtagccaccacgcccagctaatttttgtacttttagtagagacgggggtttcaccatgttgtccaggctggtcttgaactcctgacctcaggtgatccacccgcctcggccccccaaagtactaggattacaggcgtgagccaccgcgtccagcgccctggcggtttttaatcaagtagaaaagctgcattataccacttgcttcggttgcttcagtgagaacgaagaaatggaaatgcaaatcccttattagttgtaggaaacagatctcaaacagcagttttgttgacaagaccgcaggaaaacgtgggaactgtgctgctggcttagagaaggcgcggtcgaccagacggttcccaaagggcgcagtccttcccagccaccgcacctgcatccaggttcccgggtttcctaagactctcagctgtggccctgggctccgttctgtgccacacccgtggctcctgcgtttccccctggcgcacgctctctagagcgggggccgccgcgaccccgccgagcaggaagaggcggagcgcgggacggccgcgggaaaaggcgcgcggaaggggtcctgccaccgcgccacttggcctgcctccgtcccgccgcgccacttggcctgcctccgtcccgccgcgccacttcgcctgcctccgtcccccgcccgccgcgccatgcctgtggccggctcggagctgccgcgccggcccttgccccccgccgcacaggagcgggacgccgagccgcgtccgccgcacggggagctgcagtacctggggcagatccaacacatcctccgctgcggcgtcaggaaggacgaccgcacgggcaccggcaccctgtcggtattcggcatgcaggcgcgctacagcctgagaggtgacgccgcgggcccctgcgggacgggtggcgggaaggagggaggcgcggctggggagagcgctcgggagctgccgggcgctgcggaccccgtttagtcctaacctcaatcctgccagggaggggacgcatcgtcctcctcgccttacagacgccgaaacggagggtcccattagggacgtgactggcgcgggcaacacacacagcagcgacagccgggaggtaagccgcgtcccagcggctccgcggccgggctcgcagtcgccccagtgatgccgtggcccccgaggcgggcgtcatcgggcagcgtttgcccagtgctggagggttagggagagctgcctgggcttgaccgcgcgccggtctcaaagtcctggctttggcccctcctccgttttcccctgtggaccattccgcttcgcagcgttttcaaaaactggagcgaaagtgatgtgggcggggcaaaggcggcgggaagaggacagcactgaagctggcgcgggaacttggtttcctggtggcctcccatccaatccccacgaaccagctttcctcttaaaccttgaaaagagaaattcgggagttcgagttcttagtcgtcctttcctctttcctttccgacaggagcaccccaggcaaaaaatgtctcgcgggtcattggcgccaggctttcaggggacagtggggcggggcggggtgggcacaggacgttaggcagccgttggccctccctaaggccacaccgtcctgccgtcctggatcctgcgccagctgcgcgggggaggggactcgaaggtgtgtgagccaggggctgaccttgaccgctcagataaatggagcgcagccttgacacaggggtggaggtggttttgaatggggaaacccattcgtggtgaagcagattcactgtagctagcggaaaagccctccggcccacggacccatctagagacgaatacatagcagctgctgtggctgattggcgtgggacagcgtggggagttttgtctgaggagagggatccacttttctgcagctccaagcccaggggcctttgatgagccatagacctcatttttaacccacctttctgcttagacattgagcaagttacttctcatatagcttccctatatgttaaaaatggagaaaataatgcttagtaggcaattctgataaaagcaggtgcttgcaaaaatctctctgttgtctgaatataaactgtaccacaagcgagtgcggatgaacgaggactgcatttaaagataagtttttacactttcatttctctgtggctcgacacttctgatgcctccctttttgttcctgggacacatgcttggtgttgtcttcacacctttgtgacaggattagcactagtgggcagtggatgatagctcctcctcccttttgccacatgttcatccctgccctcgccaccatctcactgtgtggaattcctgtgtccactggtcaccggggcacagaagtgctgtctcagcctgaatcgggccactgatgggacttgcagcctgggagctccaccgtgatctctggcccactttgcgggagtctaggctttctggatgctccaggcctcacgtcccagggcagttttcttccctgaagaaagttggatggcatgatctgtcttcccatcttgaaaccgtatggcaaattgtttttcagatgaattccctctgctgacaaccaaacgtgtgttctggaagggtgttttggaggagttgctgtggtttatcaaggtaaagaagtcgctgctattagaagtcagtagtctgttctcaacacagcagccagtgagatcctttcaaaactcaaagcagccaggtgtggtggctcacgcctgtaatcccaccgctttgggaggctgagtcagatcacctgaggttaggaatttgggaccagcctggccaacatggcgacaccccagtctctactaataacacaaaaaattagccaggtgtgctggtgcatgtctgtaatcccagctactcaggaggctgaggcatgagaattgctcacgaggcggaggttgtagtgagctgagatcgtggcactgtactccagcctggcgacagagggagaacccatgtcaaaaacaaaaaaagacaccaccaaaggtcaaagcatatcattcctcaccctcaagcccttagtggctccatttcactcagtaagagccacggtccttatggtgtccgtttttcagctctgaccttagctgctgctctctgcaccaccctgctgttcttgtgagtttttgagcacaccgggacatccccactccctggaaccttcttcccccacacttggcttcttcctttgagtctctactccactcgggcaagccttcctagacctcctgatttaaaactgtgactctcccccaacctccttggtgtttctccgtagacgaacatcaccatctgatgtatgtcagcctttcccttcccctgttagaagggggacagcaggtagtaaaagtgaaatgtgctgtaagctttatgagggcagaggatttgtttctcgtgttcactgttgtatcgccagggcctcaaacacagcctgccacatagtaggagtcaacatatattgatcactaaatgtagataccacctgtgttcccatgttcatataaattctagaagagtctcttcagtaacaaggtgaaccccttccagagggctgagtaggtacctcaggccggggccagagtgctgtgaagacagcagcagcccagaccaagcttctctgtgttccgtgtcctggtctagaaccagcgatgttctttctgaccagtgctttttggaaggtggctgaggtctgggctcaggtctgggccatactagaagctgggatcccttctatagagcacttggtatggcttgtatggtcttggggcaagccagacccaagccctcttatcccattttagaaagggcttcaatttggatccagccccaggtctgccttagctctgtattcttggggtattttgttctgtattggcctatcttgactaacaatgagccttggatttgaaacatatcatcagaaacctcagaagacaacattcttaaactggctagagcctggtctgaatggatgaaaaggagagacttttgaagcaatatgtaaaagattgagaaatgatttgttggaaatttctcaattggagaaatttctttgatttgttggaaatttctttgattctttctcaatcaaagaaaatcgggacaaactcaacaatagaaagggaggaagcaagatactcagaaataaaatgcattcccctgtttcaacttaatgcttcaattcaggattctaaggaatccttgccaggaatgtcagactcaccttgatagttggagttactccattggtgactcgatcaaatacaggagttgaggcacctgcactgtaaaatactgattagtctgatcattaggaatatcctgtatgccaggtagaagatacattgaacagattgcatgtaggcattaaattcattttggggtattacatatagacaacacatttcattaagaaacataaaactgtcagatcggtggaatacttaaaagcacttggaggtgtttagcctaaaaagcttagttgaggggaatggaagaaaagatctgggagggtggttccaaagaagggatcagactatcctaaagccctcaggaatctgggctgggaccacctacttaaagataggatgggcagctgggtgtggtggctcacgcctgtaatcccagcacttcgggaggccgaagcgggcggatcacctgaggtcaggagttcgaggccagcctgaccaacatggagaaacgctgtctctactaaaaatacaaaattagctgggtgtagtggcgcatgcctgtaatcccagctactcgggaggctgaggcaggggaatcgcttgaacctgggaggtggagggtgccgtgagccacgatcgcgccattgcactccagcctgggcaacaagagcgaaactctcaaaaaacaaaaaaaaggatgggttccatatgggtggtgtcaagtgcccacctcctagcaagtcagcaggggccagaggcccttgtaagtggtgtctcggggggatcaactgagatggcttaagatttacctggatgcctgctctgctctccccatctcttccagggatccacaaatgctaaagagctgtcttccaagggagtgaaaatctgggatgccaatggatcccgagactttttggacagcctgggattctccaccagagaagaaggggacttgggcccagtttatggcttccagtggaggcattttggggcagaatacagagatatggaatcaggtgaggagatagaacaatgccttccatttccgggtgcccttcctagcacgtgtttgctccgttgttttagataaggtctgggggatgagtcaatgtcacaggagctgatgtatagctttgaccttgtgaggggtggtgccaggttgaagccacaattaacgcctactgaaggccgtttcacatcttttttttttttttttttttaattattatactttaagttttagggtacatgtgcacaatgtgcaggttagttacatatgtatacatgtgccatgctggtgcgctgcaccactaactcaccatctagcatcaggtatatctcccaatgctatccctcccccctcctcccaccccacaacatccccagagtgtgatgttccccttcctgtgtccatatgttctcgttgttcgattcccactatgagtgagaatatgcggtgtttggttttttgttcttgcgatagtttactgagaatgatgatttccatttcaccacgtccctacagaggacatgaactcatcattttttatggctgcatagtattccatggtgtatatgtgccacattttcttaatccagtctatcatgttggacatttgggttggttccaagtctttgcctattgtgaatagtgccacaataaacatacgtgtgcatgtgtctttatagcagcatgatttaatagtcctttgggtatatacccagtaatgggatggctgggtcaaatggtatttctagttctagatccccgaggaatcgccacactgacttccacaatggttgaactagtttacagtcccaccaacagtgtcaaagtgtcctatttctccacatcctctccagcacctgttgtttcctgactttttaatgattgccattctaactggtgtgagatggtatctcattgtggttttgatttgcgtttctctgatggccagtgatggtgagcattttttcatgtgttttttggctgcataaatgtcttcttttgagaagtgtctgttcatgtccttcgcccactttttgatggggttgtttttttcttataaatttgtttgagttcattgtagattctggatattagccctttgtcagatgagtaggttgcaaaaatgttctcccattttgtgggttgcctgttcactctgatggtagtttcttttgctgtgcagaagctctttagtttaattagatcccatttgtcaattttggcttttgttgccattgcttttggcataggcatgaagtccttgcccatgcctatgtcctgaatggtaatgcctaggttttcttctagggtttttatggttttaggtctaacgtttaagtctttaatccatcttgaattgatttttgtataaggtgtaaggaagggatccagtttcagctttttacatatggctagccagttttcccagcaccatttattacatagggaatcctttccccattgcttgtttttctcaggtttgtcaaagatcagatagttgtagatatgcggcgttatttctgagggctctgttctgttccattgatctatgtgtctgttttggtaccagtaccatactgttttggttactgtagccttgtagtatagtttgaagtcaggtagcgtgatgcctccagctttgttcttttggcttaggattgacttggcgatgcgggctcttttttggttccatatgaactttaaagtagttttttccaattctgtgaagaaagtcattggtagcttgatggggatggcattgaatctataaattaccttgggcagtatggccattttcacgatattgattcttcctacccatgagcatggaatggtcttccatttctttgtatcctcttttatttcattgagcagtggtttgtagttctccttgaagaggtccttcacatcccttttaaggtggattcctaggtattttattctctttgaagcaattgtgagtggaagttcactcatgatttggctctctgtttgtctgttattggtgtataagaatgcttgtgatttttgcagattgattttatatcctgagactttgctgaagctgcttatcagcttaaggagattttgggctgagacaatggggttttctagatatacaatcatgtcgtctgcaaacagggacaatttgacttcctcttttcctaattgaataccctttatttccttctcctgcctaattgccctggccagaacttccaacactatgttgaataggagtggtgagagagggcatccctgtcttgtgccagttttcaaagggaatgcttccagtttttgcccattcactatgatattggctgtggctttgtcatagatagctcttattattttgaaatatgttccatcaatacctaatttattgagagtttttagcatgatgtgttgttgaattttgtcaaaggctttttctgcatctattgagataatcatgtggtttttgtctttggatctgtttatatgctggattacatttattgatttgcgtatattgaaccagccttgcatcctagggatgaagcccacatgatcatggtggataagctttttgatgtgctgctggattcggtttgccagtattttattgaggatttttgcatcaatgttcatcaaggatattggtctaaaattctcttttttggtgtgtctctgcccagctttggtatcaggatgatgttggcttcataaaatgagttagggaggattccctctttttctattgattggaatagtttcagaaggaatggtaccagttcctctttgtacctctggagaattcggctgtgaatccatctggtcctggactctctttggttggtaagctattgattattgccacaatttcagctcctgttattggtctattcagagattcaacttcttcctggtttagtcttgggagagtgtatgtgtcaaggaatttatccatttcttctagattttctagtttatttgcgtagaggtgtttgtagtaatctctgatggtagtttgtatttctgtgggatcggtggtgatatcccctttatcattttttattgcgtctatttgattcttctctttttctttattagtcttgctagcggtctataaattttgttgatcctttcaaaaaaccagctcctggattcattaattttttgaagggttttttgtgtctctatttccttcagttctgctctgattttagttatttcttgccttctgctagcttttgaatatgtttgctcttgcttttctagttcttttaattgtgatgttagggtgtcaattttggatctttcctgctttctcttgtgggcatttagtgctataaatttccctctacacactgctttgaatgtgtcccagaggttctggtatgttgtgtctttgttcttgttggtttcaaagaacatctttatttctgccttcatttcgttatgtacccagtagtcattcaggagcaggttgttcagtttccatgtagttgagcagttttgagtgagattcttaatcctgagttctagtttgattgcactgtggtctgagagatagtttgttataatttctgttcttttacatttgctgaggagagctttacttccaactatgtggtcggttttggaataggtgtggtgtggtgctgaaaaaaatgtatattctgttgatttgggatggagttctgtagatgtctattaggtctgcttggtgcagagctgagttcaattcctgggtatccttgttgactttctgtctcgttgatctgtgtactgttgacagtgggtgttaaagtctcccattattaatgtgtggagtctaagtctctttgtaggtcactcagatgattggcacttactgggcgcttggcactttccatactgtgtcatcggcagatagctgcatggttggtgttcgtgctggggaatgggaagttcatcggtgggacaaggacaaaatgcccccattgctttgttgtggctttaatctccctttcgaggctgagccacagcgtgctgtaggtggcgctgctgtgaagcgcagtaccagggtcacactccactcccagctctgcagaggtggagaaagaatgaaacatctcactcctggacttccactttcctgtcactgttggtgtcacctcttactggatgtcacagagcccagcccctcccacctgtgcctaggaaaagcagatgccaccttggaatgtggggtttgtgtgtgcaatttactagctgggcagagaccagcaacctggagagcaggtgtctcgtctaaggggacagtcacatttcacctccagccacctggaggaatttgggcctggtgatgtcagaattcttcaataaaagcctaaaatctatattttatgtgcggtcatgagatctgttaaatgttagcaacttcaggaagtttaaaaatgctgtgtggacctagaataggcaagttcttaaaggcagaaagtggaatgctagtttccagggactggggaacagggaggaatggggagttcatgtttaatgggcacagaggttttgttagggatgacgaaaaagttcgggagatggtgatggtgatggagatggtgatggtgatggagatggtgatggtgatggtgatggtgatgggtgatggtgatggtgatggtgatggtgatggagatggtgatggtgatggtgatggagatggtgatggtgatggtgatggtgatggagatggtgatggtgatggagatggtgatggtgatggtgatggagatggtgatggtgatggtgatggtgatggtgatggtgatggtgatggagatggagatggtgatggtgatggttgcctaacatcaggaacgtgcttaatgcttctgaattgcacacaaaaatggcaagtttaatattatgtgtactttatcacaatgaaaaaagctgctgcgtgggccaagttacttgtgcaggtaatgttctgcaggtggttgcctgcacctcagttgtagggtgtccgtaggatgtgaggccagtccccgggcttaatgatgctttaaatcctgcctagtattcaattatttcttgtcgcttaaaaggcctaataaaattatggtcttagtttacagtggtatgaatgcttagctgttggattttagtaggaaagttcgtccctttttgtttttaattttgttttacagattcacaggaattttttttttttttttttttttttttttttaatgcacagaaagtttccctggactctctacccagtttccccagtgataatatcttgggtaacatcctgtatacattcacattggtgcattcctcagagttgtcagattttgctagttttacgtgcacttgtgtatgtgtgtatttgcaattttagcacgtgtagactcttgtaaccactacaatcaagttacagaactacactaccaaggttcatctttttaaaatctttgatgttaccttttttggaacagtgaccatgagaggactttcctcccaaaattttgaaaactactgaaccagaatatagtctgacactaataggtagaaatttaaccaaaggagattatgaagctctgcacttgagttaacaaaatcacttctcagcttccagttccatctcagaaggaaggaaaagggattaaaaatccagagaccagaaaatgggagcaaagtacaaggtggtgtaatcattacagaggtttcctgatgtttccaagtcagtcgtgtgttgagctgctaaactctaaagtaattttaggtggaatgttggaaacatgctgctgaggtgatagaaaggaatccatggtcctctgttagttggaaagtatatggaatactatattctacataagatacaatactctctgtgagacaaggataaagtagattttgtcagtgaaattgtgacaagaatcgctgatgggtttagagcctaagtttgcgaggagcactggaagaaattaagattgttgagattggaaagggttagctatgggggaacaggaggaggtgactccatgacagaccaaatattcaaaggactgtgtagaagaggaaaaagactttgttagggctccagaggacagagccaggagtcagacagggccttgaactcaacccaccgagatctgcaaactttgcaggatgcaccagatgtcttgtagccatgggtcaaggggggaccctgggtaagagactgtaatagatgacctctaaggccatctcatgacatgtgtgattaatgtatgtacctgtcctctctttttgacaattctacagattattcaggacagggagttgaccaactgcaaagagtgattgacaccatcaaaaccaaccctgacgacagaagaatcatcatgtgcgcttggaatccaagaggttgaaagaaccccgtcgtcttcatttatactaaccatactcttagagggaagcaatctggttttgtgcagaggcactgagggaggcaggaccctgggcaacttcccccagccacatggttgtgtgacgttgggcaagtcacattttgctgcactttcaccttcagatcatgaggttgggcccagaggatttttttttttttttttttttttgagacagagttttgctctgttgcccaggctggaatgcaacggcgtgatcttggctcactgtaacctctgcctcctgggttcgagtgattctcctgcctcagcctccaagtagctgggattacagcatgtgccaccatgcctggctaattttgtatttttagtagagacgggttcacatgttggtcaggctggtcttgactcctgaccctcagatgatctgccttgcctcagcctcccaaccgagtgatcttaagttgtgtattatactcattcttacacaaaaagggctttaaatgcctagaaactacatgaagatgttaacattttaaatggaagcagatgaagttccagctcgctgccacctcactaacatttttaacaattatattgtaaaattcaactctaccagggtgtagagccaggtgtggtggctcacacctgtaattccaacaactccagaggccaaggcgagaggatcatttgaacccacggaatttgaggctgtagtgagtcatgatcacgccattgcactccatcctgggcaacagagtgagaccctgaatatttaaaaacaacaacaacaacaaaactctatcaggatatcataagtacttagagtgaaatacttgcatctgtaatagagacttattttttttttttttgagacacagtctcaccctgttgcccaggctggagtgcagtggtttgatctccgctcacggcaacctccatctcccaggttcaagtgagttcccattcctcagccccagagctgggaccacaggcgcgcgaatttttgtatttttagcagagacggggtttcactatgttggccaggctagtctcaaactcaagttggcctcaagtgatctgcccaccctggcgtcccagtgttgggatttcaggcatgagccactgtgcctggccatgtaatagagacttttaatataggagggtgtaccagaagcaccagtttcctgtggcaaacagaattattcctgctgtatttgtaatttggtgccacgaggtagcccagatcccttcagctctgatggaagagcattgcttcagccgtaaatggacacctgcagaaaccttgcaccgatggatagtctccctcagctccgtgccatcgctgcaggggctgttatggacatcactgcagcccagtggctctctctcctggtctccaccatatgagttggcttctgtttctctcctgttttactttgcctttagctgtggtctttcaaaccaccatccctccttatcttcctctgctggttcctcagatcttcctctgatggcgctgcctccatgccatgccctctgccagttctatgtggtgaacagtgagctgtcctgccagctgtaccagagatcgggagacatgggcctcggtgtgcctttcaacatcgccagctacgccctgctcacgtacatgattgcgcacatcacgggcctgaaggtgggctgtctcgggaagggtgacttgccagcctaccacatgagctcttcagttctttaatatgggaaaacaaattgcagagtttagtctctgattagcttttaaatttgatatgtgtaagtaagacatgaaccagcttttactttgaaaccttccttttctggaaggttttctggccctgtggtatatgcactaacagatctatacaggttgtttgtgatacagcttctatggatcttctcaaaagctatgctgaggttgggtatggtggctcatgcctgtaatcccagcactttggaagactgagacaggagcaattgcttgaggtctggagttcaataccagcctgggcaacataacaagatgctgttgctacaaaaaaatggaaaagctacactaaattatttttttaaaaaaagccttgcggtgtctgcatattctaatgtttttaaatgatgttttaaagaattgaaactaacatactgttctgctttctcccggtttatagccaggtgactttatacacactttgggagatgcacatatttacctgaatcacatcgagccactgaaaattcaggtaagaattagatgttatacttttgggtttggtaccttctcttgataaaaggttgactgtggaacaggtatctgctcaatgctgtgtccaagataaagatgactgctccaaatgtggggcttcagtttagggagaagtggtgggcaggtgggcaggacaaggcaggcatctgcctcagcaaccatggcacttaacttgtcaggtgctgtgaggtactaagcaccagtaccagagagggaagagccacattcaagccaggggattgtccaaaaggaggcattttaactcattttaacttgaaggagaattgaagtgcaaatgtttttccttttctttttttttgagatggagtctttctctgtcggccaggctggagtgtgccgtggtgcgatctcagctcactgcaacctccacctcccgggttcaagcaattcttctgcctcagcctcccaggtagctgggattacaggcacatgccaccacacccagctaattttttgtattattagtagagatggggtttcgtcatgttggccaggctgatctcaaactcctgacttcaagtgtaccacctgcctcagcctccgaaagttctggaattacaggcataagccaccaccctggccataaatattttttgttaattttacattaagtacaatatttaggtccaaacttcaaaagtctgttgaaatccctgaagttatagcagccaacaattgatatgaaatggcaataaaaatgtaagttcatctgcttcatgagccttaaggaaaaaaactcagaaccagacactttttagccccttccaggttagatccaggttttaaaagttattcctttgagggagtttggctgcttttgagtggaggtgacttcaggcttattctctctggctctctgctctggtcatttttagacatagtaataggttgtgacctgtcttcacatcctaattgccactgtctgttcatcccaggaatcctggctttcatccctttctgttcactgtccatgcatgtcatctttccttctttctgccagggaccagatgggttagggattgtgaattcaagtaaacgtagagctactatgagttacagattgactgtgttcctgtctttaataaatttgccaagagtggttataagaacttacacctgatgaggcaccaggctcctgatgctgtgtaatgtcacaaaatacccctcactctcgatctgtgcaagagaacagctggttgcgctccaatcatgttacataacctacgcgaaggtatcgacaggatcatactcctgtaaaatagaactttgttgatcacatcctgtgtacttgtttcacggacatgaggagcaattacaacaggtcgtacaattatggcaaaataatggccttattttgtttttagcttcagcgagaacccagacctttcccaaagctcaggattcttcgaaaagttgagaaaattgatgacttcaaagctgaagactttcagattgaagggtacaatccgcatccaactattaaaatggaaatggctgtttagggtgctttcaaaggagctcgaaggatattgtcagtctttaggggttgggctggatgccgaggtaaaagttctttttgctctaaaagaaaaaggaactaggtcaaaaatctgtccgtgacctatcagttattaatttttaaggatgttgccactggcaaatgtaactgtgccagttctttccataataaaaggctttgagttaactcactgagggtatctgacaatgctgaggttatgaacaaagtgaggagaatgaaatgtatgtgctcttagcaaaaacatgtatgtgcatttcaatcccacgtacttataaagaaggttggtgaatttcacaagctatttttggaatatttttagaatattttaagaatttcacaagctattccctcaaatctgagggagctgagtaacaccatcgatcatgatgtagagtgtggttatgaactttaaagttatagttgttttatatgttgctataataaagaagtgttctgcattcgtccacgctttgttcattctgtactgccacttatctgctcagttccttcctaaaatagattaaagaactctccttaagtaaacatgtgctgtattctggtttggatgctacttaaaagagtatattttagaaataatagtgaatatattttgccctatttttctcattttaactgcatcttatcctcaaaatataatgaccatttaggatagagttttttttttttttttttaaacttttataaccttaaagggttattttaaaataatctatggactaccattttgccctcattagcttcagcatggtgtgacttctctaataatatgcttagattaagcaaggaaaagatgcaaaaccacttcggggttaatcagtgaaatatttttcccttcgttgcataccagatacccccggtgttgcacgactatttttattctgctaatttatgacaagtgttaaacagaacaaggaattattccaacaagttatgcaacatgttgcttattttcaaattacagtttaatgtctaggtgccagcccttgatatagctatttttgtaagaacatcctcctggactttgggttagttaaatctaaacttatttaaggattaagtaggataacgtgcattgatttgctaaaagaatcaagtaataattacttagctgattcctgagggtggtatgacttctagctgaactcatcttgatcggtaggattttttaaatccatttttgtaaaactatttccaagaaattttaagccctttcacttcagaaagaaaaaagttgttggggctgagcacttaattttcttgagcaggaaggagtttcttccaaacttcaccatctggagactggtgtttctttacagattcctccttcatttctgttgagtagccgggatcctatcaaagaccaaaaaaatgagtcctgttaacaaccacctggaacaaaaacagattttatgcatttatgctgctccaagaaatgcttttacgtctaagccagaggcaattaattaatttttttttttttgacatggagtcactgtccgttgcccaggctgcagtgcagtggcgcaatcttggctcactgcaacctccacctcccaggttcaagtgattctcctgcctcagcctcccatgtagctgggatcacaggcacctgccaccatgcccggctaattttttgtattttttgtagagacagggtttcaccatgttggccaggctggtctcaaacacctgacctcaaatgatccacctgcctcagcctcccaaagtgttgggattacaggcgtaagccaccatgcccagccctgaattaatatttttaaaataagtttggagactgttggaaataatagggcagaggaacatattttactggctacttgccagagttagttaactcatcaaactctttgataatagtttgacctctgttggtgaaaatgagccatgatctcttgaacatgatcagaataaatgccccagccacacaattgtagtccaaactttttaggtcactaacttgctagatggtgccaggtttttttgcacaaggagtgcaaatgttaagatctccactagtgaggaaaggctagtattacagaagccttgtcagaggcaattgaacctccaagccctggccctcaggcctgaggattttgatacagacaaactgaagaaccgtttgttagtggatattgcaaacaaacaggagtcaaagcttggtgctccacagtctagttcacgagacaggcgtggcagtggctggcagcatctcttctcacaggggccctcaggcacagcttaccttgggaggcatgtaggaagcccgctggatcatcacgggatacttgaaatgctcatgcaggtggtcaacatactcacacaccctaggaggagggaatcagatcggggcaatgatgcctgaagtcagattattcacgtggtgctaacttaaagcagaaggagcgagtaccactcaattgacagtgttggccaaggcttagctgtgttaccatgcgtttctaggcaagtccctaaacctctgtgcctcaggtccttttcttctaaaatatagcaatgtgaggtggggactttgatgacatgaacacacgaagtccctctgagaggttttgtggtgccctttaaaagggatcaattcagactctgtaaatatccagaattatttgggttcctctggtcaaaagtcagatgaatagattaaaatcaccacattttgtgatctatttttcaagaagcgtttgtattttttcatatggctgcagcagctgccaggggcttggggtttttttggcaggtagggttgggagg

SEQ ID NO: 120 - DNA, 1301 bp, Homo sapiens
gggcacgcgcaccaccgcccgcagcgcagcccgcgcccgcgcaggccccgcagccggcccagcccgccgccaccggccgcggctgcctccagaggacctggtccagacaagatgtgaaatggagaagtatctgacacctcagcttcctccagttcctataattccagagcataaaaagtatagacgagacagtgcctcagtcgtagaccagttcttcactgacactgaagggttaccttacagtatcaacatgaacgtcttcctccctgacatcactcacctgagaactggcctctacaaatcccagagaccgtgcgtaacacacatcaagacagaacctgttgccattttcagccaccagagtgaaacgactgcccctctccggccccgacccaggccctccctgagttcaccagtatattcagctcacaccagaccgcagctccagaggtgaacaatattttcatcaaacaagaacttcctacaccagatcttcatctttctgtccctacccagcagggccacctgtaccagctactgaatacaccggatctagatatgcccagttctacaaatcagacagcagcaatggacactcttaatgtttctatgtcagctgccatggcaggccttaacacacacacctctgctgttccgcagactgcagtgaaacaattccagggcatgcccccttgcacatacacaatgccaagtcagtttcttccacaacaggccacttactttcccccgtcaccaccaagctcagagcctggaagtccagatagacaagcagagatgctccagaatttaaccccacctccatcctatgctgctacaattgcttctaaactggcaattcacaatccaaatttacccaccaccctgccagttaactcacaaaacatccaacctgtcagatacaatagaaggagtaaccccgatttggagaaacgacgcatccactactgcgattaccctggttgcacaaaagtttataccaagtcttctcatttaaaagctcacctgaggactcacactggtgaaaagccatacaagtgtacctgggaaggctgcgactggaggttcgcgcgatcggatgagctgacccgccactaccggaagcacacaggcgccaagcccttccagtgcggggtgtgcaaccgcagcttctcgcgctctgaccacctggccctgcatatgaagaggcaccagaactgagcactgcccgtgtgacccgttccaggtcccctgggctccctcaaatgacagacctaactattcctgtgtaaaaacaacaaccc

SEQ ID NO: 121 - DNA, 836 bp, Homo sapiens
gtgaaacaccctcggctgggaagtcagttcgttctctcctctcctctcttcttgtttgaacatggtgcggactaaagcagacagtgttccaggcacttacagaaaagtggtggctgctcgagcccccagaaaggtgcttggttcttccacctctgccactaattcgacatcagtttcatcgaggaaagctgaaaataaatatgcaggagggaaccccgtttgcgtgcgcccaactcccaagtggcaaaaaggaattggagaattctttaggttgtcccctaaagattctgaaaaagagaatcagattcctgaagaggcaggaagcagtggcttaggaaaagcaaagagaaaagcatgtcctttgcaacctgatcacacaaatgatgaaaaagaatagaactttctcattcatctttgaataacgtctccttgtttaccctggtattctagaatgtaaatttacataaatgtgtttgttccaattagctttgttgaacaggcatttaattaaaaaatttaggtttaaatttagatgttcaaaagtagttgtgaaatttgagaatttgtaagactaattatggtaacttagcttagtattcaatataatgcattgtttggtttcttttaccaaattaagtgtctagttcttgctaaaatcaagtcattgcattgtgttctaattacaagtatgttgtatttgagatttgcttagattgttgtactgctgccatttttattggtgtttgattattggaatggtgccatattgtcactccttctacttgctttaaaaagcagagttagatttttgcacattaaaaaattcagtattaatt

SEQ ID NO: 122 - DNA, 182 bp, Homo sapiens
  misc_feature (1)...(182): n=a,t,g or c
gatcaaaattgaagacacattcagaggtttgattggttgagattaactggtgtggtggttggtgtatgtatgtttnattttnatgtctttgtatgtagttctacataatgcaaattgtgctttctgatggacaagacctcataactgtgattaatatcaataaaaaggggatgttgtggaaa

SEQ ID NO: 123 - DNA, 2620 bp, Homo sapiens
catcgggggatgatctggaaagcgcgatcagtgaagcggacgaacggcaggataaggcgggtctagtgacaggaatgggccgatgaagctctgtagggatggtgggtaggccgatcgggccgtgtccccggcctcccgatccgacggaatttggaaatcccggggctattcatacattgagcttttaggagcggaggagaaaagccaccaccctgacgatcccggctctcgctccaccttcactcaggtggcccggcagcggaagtgacgaacgcggaagtggtttttctgttgccgaggggacgggccgggcagatgccaacatggcagcggttggggctggtggttccaccgcggcgcccgggccaggggcggtttccgcgggtgcattggagccggggaccgccagtgcggctcacaggcgcctgaagtacatatccctagctgtgctggtggtccagaatgcctccctcatcctcagcatccgctacgcccgcacgttgccaggggaccgcttctttgccaccactgctgtggtcatggcggaagtgctcaaaggtctcacctgcctgctgctgctcttcgcacagaagaggggtaacgtgaagcacctggttctcttcctccatgaggctgtcctggtgcagtatgtggacacgctcaagctcgcagtgccctctctcatctacaccttgcagaataacctccagtatgttgccatctctaacctaccagctgccactttccaggtgacataccagctgaagatcctgaccacagcgctgttctccgtgctcatgctgaatcgcagcctttcccggctgcagtgggcctccctgctgctcctcttcactggcgtcgccattgtccaggcacagcaagccggtgggggaggcccacggccactggatcagaaccctggggcaggcctggcagccgtcgtggcctcctgtctctcctccggcttcgcaggtgtctactttgagaagatcctcaaaggcagctcaggctccgtgtggctgcgcaacctgcaactgggcctcttcggcacagcactgggcctggtggggctctggtgggctgagggtaccgccgtggccacccgtggtttcttttttgggtacacacctgctgtctggggcgtggtgctcaaccaggccttcggcgggctactggtggctgtggttgtcaagtacgctgacaatatcctcaagggctttgccacctccctgtccattgtgctgtccactgttgcctccattcgcctctttggcttccacgtggacccattatttgcccttggcgctggactcgtcattggtgctgtctacctctacagccttccccgaggtgcagccaaagccatagcctctgcctctgcctccgcctccgggccctgcgttcaccagcagcctcccgggcagccaccaccaccgcagctgtcttcccaccgtggagacctcatcacggagccctttctgccaaagtcagtgctggtgaagtgagggctggcagcaatggggggacacaagggagggggactggggtggagggtgttgggcatctgcaggacccaagtcgccaccctccggggcctggctcctctgggtttgggagatggtcttttctcccaggtcactgagacttctggaggggtgtgggactagagctgggtgtcacgtgaacccttcctggtagggtgacccccttcccctggagggggttttagagctgccgcctctgctccctctaacctctttggaggcagggttgggggtattgtcattcaaggccttttttttgtctgctccctccccgaccctgtgccctcttctggaggtttctcgtctgggagagtccctcccagcagtccctccacctccataaggacacactggacaaaactcccgcagctcttcaggaatgaccgatgcctacctgtggggttcagttgcccatagtttgaggccttctctcctcccttaccaccgctctggatcatgttactagttccgtcttttgtgtggccttgggccagcttccttgataccttgaagatgggcttcttgtgagtccccagggagaaagggacaagagctaagatttttgcatcagcccttctggcagaaggtgtggtaggggccatttgttttttttagtggacttgggatttgtggtgtaatcatatcattaatgatccagggtgtgggaaaaatggaggtccttgaagtggctgaatctcattgtatttaagacactgtcagttgccagatgtaggcttatttttggagatgtctaggagaggaaaaagctaccaatcatactcttgatatccgtctggctgtgtgaggcacccctacctcatgggggtgtcttgggattgatgaactgtggaacctgcctcctgcgctccccaaagcttattaaccccttaactgtatcggggcggggtgtgtgtgtgcatggaagatgcctgggctgtctttgctatatgtaaatagagccattggatctttatttttgattaatttgttctgattttttggtttgttttttaaggaactgtaatgaacaaatgtcaggatatccaatgccaaataaagatgttgtatttatttag

SEQ ID NO: 124 - DNA, 2103 bp, Homo sapiens
ctcgagatccattgtgctctaaagagtctccaccgccgtccaggacccacttgcagcatggagtcgcccgcctcgagccagcccgccagcatgccccagtccaaaggaaaatccaagaggaagaaggatctacggatatcctgcatgtccaagccacccgcacccaaccccacacccccccggaacctggactcccggaccttcatcaccattggagacagaaactttgaggtggaggctgatgacttggtgaccatctcagaactgggccgtggagcctatggggtggtagagaaggtgcggcacgcccagagcggcaccatcatggccgtgaagcggatccgggccaccgtgaactcacaggagcagaagcggctgctcatggacctggacatcaacatgcgcacggtcgactgtttctacactgtcaccttctacggggcactattcagagagggagacgtgtggatctgcatggagctcatggacacatccttggacaagttctaccggaaggtgctggataaaaacatgacaattccagaggacatccttggggagattgctgtgtctatcgtgcgggccctggagcatctgcacagcaagctgtcggtgatccacagagatgtgaagccctccaatgtccttatcaacaaggagggccatgtgaagatgtgtgactttggcatcagtggctacttggtggactctgtggccaagacgatggatgccggctgcaagccctacatggcccctgagaggatcaacccagagctgaaccagaagggctacaatgtcaagtccgacgtctggagcctgggcatcaccatgattgagatggccatcctgcggttcccttacgagtcctgggggaccccgttccagcagctgaagcaggtggtggaggagccgtccccccagctcccagccgaccgtttctcccccgagtttgtggacttcactgctcagtgcctgaggaagaaccccgcagagcgtatgagctacctggagctgatggagcaccccttcttcaccttgcacaaaaccaagaagacggacattgctgccttcgtgaaggagatcctgggagaagactcataggggctgggcctcggaccccactccggccctccagagccccacagccccatctgcgggggcagtgctcacccacaccataagctactgccatcctggcccagggcatctgggaggaaccgagggggctgctcccacctggctctgtggcgagccatttgtcccaagtgccaaagaagcagaccattggggctcccagccaggcccttgtcggccccaccagtgcctctccctgctgctcctaggacccgtctccagctgctgagatcctggactgagggggcctggatgccccctgtggatgctgctgcccctgcacagcaggctgccagtgcctgggtggatgggccaccgccttgcccagcctggatgccatccaagttgtatatttttttaatctctcgactgaatggactttgcacactttggcccagggtggccacacctctatcccggctttggtgcggggtacacaagaggggatgagttgtgtgaataccccaagactcccatgagggagatgccatgagccgcccaaggccttcccctggcactggcaaacagggcctctgcggagcacactggctcacccagtcctgcccgccaccgttatcggtgtcattcacctttcgtgttttttttaatttatcctctgttgattttttcttttgctttatgggtttggcttgtttttcttgcatggtttggagctgatcgcttctcccccaccccctagggtaccagcaggcagagccttgccctctgctcaggctggggtccagtgggaggggcccaaaatctctgctcagagaagtgcagggggagccttccagctcactctccctgaggactggcgtgacaggggctatgggtgttgtttttaaaaaaagaaaatatatttttttgaaaaaacgactgcccatcccgggtcctttccctgatgggttggggcagttacctggttgctgttttaattaaaaactttagagcacaatggatctcgag

SEQ ID NO: 125 - DNA, 267 bp, Homo sapiens
  misc_feature (1)...(267): n=a,t,g or c
aaggcttctggtagggacattttattttttggtaaagccacaatagatagaaatgccataaaaacaaacatgtaaacaaggtatcagaactttggttcactgaaacatctcacacctaaaacacctgnggtacaaaggcaccttgctaggcgctagacagctaactctgctgcagccactttgatcctagccttggggccagggatggcacaggctgaatggaagggctgggacttcagtcacacaggagtcgccctagtatggtct

SEQ ID NO: 126 - DNA, 410 bp, Homo sapiens
  misc_feature (1)...(410): n=a,t,g or c
ctcataaacaannantttattaaantacatgttacataaaagaacatataaatggaccattaaatacattcagtttattttaaacaaatttacatagatacttatttacatttctccattgtattcttaaattatttttccaagcttactaccgataaanggtaatacaatgatcatctgctcacacagatgcatagagaagttgtccacagggctnagtaaagcaccacttcccagggtnacacngcttattagatcttccagcaacaactcatgctgaaggtgctctcttctgaggcagcccttgagggtgaggcttttgctttaggaggttgctggggggttgggttctgagggagctgacccggggcagcggatggggtccttgctgntttgacccgacttgggac

SEQ ID NO: 127 - DNA, 459 bp, Homo sapiens
  misc_feature (1)...(459): n=a,t,g or c
tttttttttttttttggcttttaaagcatttaataagtcaaaatcaaataaaagtgatttttaaaaagaataaatttacatatggtacataagcaagacagctgaaggtttctaaaatagaaacctggtgcatatggccccaaaacaccacatgctttgattacactcaggaagcatgagttgcctatttgggtgagaaaatcccatgttacagtgcgatcactgggcacgttttgggagtaattccagccactgctatgtaagtgtttttaattcaggggtgtcttctacgttttcatcttctgaatatcttgtgacggtgcaggtttgaggcaaaactgggcatggaaatgaggagctgttttaggatggaaggattgccaagntgggatgggcttgggcccacagtgggcagtngggttggggggtgggattnttgggacatttaggggaaaaggg

SEQ ID NO: 128 - DNA, 449 bp, Homo sapiens
  misc_feature (1)...(449): n=a,t,g or c
ttgtttattgacatacaggtaggctctatagcaacaggcctggnggtnctgcagtagtgggggaaaatggangncggagggtggggncaggtncaaactggagaggcctagagagctagagangcaagtaaggnccagggcagantcggcttcaatggaacaacagcccagtgccctaaggcccctaactcttgctggctgtttcttgaccccaagccagggttgggagtcctctgggcatccatttttnctaaagganctggacagagtacacacaggaaaggaagctttcaccctcttgccatctggctccaggggcctccagtccagcattcctccttcttcccttnattgggtggggccacatgatgggcagccaggctctgggctgttcccactagagcaggctgcaaacacagccatttttcagtgaggcttgatcttcttna

SEQ ID NO: 129 - DNA, 322 bp, Homo sapiens
  misc_feature (1)...(322): n=a,t,g or c
aattnnaaanacatggctgcatttattgttcccagcccggcgagaaggttttcccagaaaggttccttgggtcacctgcccacccagccttggtctgggctgccatgtccccacgggcaggagagaggcacaagtcacagtcaggcaagggagcctcagcttcctgggcggtggctnttggggtccctccagtnttcacctgggaccctcggccaggttgggacanattccagggaggcgaggttgcatggtccagcggtgggtgcaggtggcaacaggttcggcgggttttgcaggttccaaaaggagntttcgggttggg

SEQ ID NO: 130 - DNA, 459 bp, Homo sapiens
  misc_feature (1)...(459): n=a,t,g or c
tgnnttcattntcaacattaaatgactatttatttttcaggtttaaaagatttcaaaatacatatgtacaagataaataaactacacaaaaattatgtcatcaaatatatttaaaaaaaaattcaaggtaggcaacttagatcaccttggcaaagaacacattaactangatgaaccaggacaagtcccctaaacatcaggatgaaatttcttttctatgcctactagctgactggccttccttttctgngttgagttgtgtactctggagtcaccagcctctggtagattatcaagcatctcttcctcatcagccttttgtttctgtcttgcatgcttctctgtccactgtctgggcattcttgaggaaggctggcttattatatttaaattctgagggtatgtcagcctgagcggggtcatcagggttgggttccgacatgagcagccgattagggg

SEQ ID NO: 131 - DNA, 376 bp, Homo sapiens
  misc_feature (1)...(376): n=a,t,g or c
tttttattatcttgctttatatttaatggattagaactataaagattcttaactttgaaagcagaaatataagttggatagtagttgcagatctttaataccattttcaatttcatttatgagctgctacattataaatgagatgctctaaaataataatcgcttttgttgttgttgttataggaacaatgaaaattcctgttaggaacacaagttgctgtttatatttgcttgttctcttaaatngtatgagganggaaggtaaggtgggagctgttgggaaaagcccatcgtgggacctttgggaggattatcttcttgggttcaggtcatcnccaccacaggntttttaagggtgtggatttcctaggtctcc

SEQ ID NO: 132 - DNA, 426 bp, Homo sapiens
  misc_feature (1)...(426): n=a,t,g or c
nnncnttttttttttttcncactcagatacacattttatttcatcaacacatcttgatttctattactttttncaatataacaaaatgttttagagatatatatgaaaaactactgctgtagttagaccccattataaatatnggngactgggcaccatgtgagaagaccacgatatcatacaangggagccaatgagctgttggacaaacgcgtcaaggctgaaccaaaattgtgacgctctcagcgcaactttgatctgaactcttgacaggtgggcatccaacatccctgctccttgaccctctgcaggattccaggaagggctcccagtgaaggtcatcagggctccgtacacagggcaccgtggggggnagggcctatggtcacttcataggccggggggaatgggctntccatgtggggg

SEQ ID NO: 133 - DNA, 387 bp, Homo sapiens
  misc_feature (1)...(387): n=a,t,g or c
atctttctctttattctgacaacattatgacattaaataaaanccaagnggtattggattagnccttgtttggnctctggngatttagataaggcagaactgagcccctcggaatgtattatctcaaagngctagtagcagctgctatgcaaagttctaaggcccgagtcaaatcctgggcatctccacagatgtgtggtagggcacgggctccagctcttgtgtaagaaagancaggantgagancagctttattttgtaggcgccaaggtctcactatgctcacacctgtaatcccagctttgagaagaggatctgggcaccagaagggtctgggtaggaaggaaagtggggaaagggtgaaggncagggaatcttttcccttct

SEQ ID NO: 134 - DNA, 419 bp, Homo sapiens
  misc_feature (1)...(419): n=a,t,g or c
ngagccagaaaaggattttttttaattcaagtaactgaaataggaaaccagagggggagccccaggctgggataaatcatggctacccctccccaacagaacagggggaggaggtggcccctacacccattatggtcgattcgggcccccttgctcactctgctgcagcatcctagaggcagggccccaccttccctgggactggggtagtcggtcacccagcctgcattgccccagcccctnttccccacaaagagtatcttgggggagggnttcgtggggcagaacaggagggcaatgagggatgaacattgctcaaactcctttcaaaggggcacctgaccgcacaggggaggntgggcaggaagggcaagggntgggggatgccgtntaaggagggcggangcaggcanttttgg

SEQ ID NO: 135 - DNA, 245 bp, Homo sapiens
  misc_feature (1)...(245): n=a,t,g or c
ncatttttattttccaatactatacaaaaaatagactgtgcatatcttaacagatccagatccaaattaaatactttttttctatttcaaactattctaagttgctaaggtgataatccagttttgagctctactctcttccactgactacttggctctcataggcatagganttctngccctatttcccacaaactccataaatggacattnctttntgtangagggggatatttncttcnaca

SEQ ID NO: 136 - DNA, 450 bp, Homo sapiens
  misc_feature (1)...(450): n=a,t,g or c
ctgagctgcacagtgtatttttctcagcagccaccagaggcacattcaccggtggcgcgtcctggtgggcctccgggtgccgtcaccaggcagcagcgcaccctccctcccgccacagtaggtctgtgcggcctgtccggccccgctgcgtggcgcaggcaattctcccaaacggctccactgggcgcctggtgctgggggcggcagttgaccacgggagggcgggacctcgccggggggcccaggacccctgaacacaagtcctccgagctggaggctactccagaaccacgggtgccgcccaccgcctccagggccgccttgatcttctccgcctcagctttggcgacattggcttttgaattnctggggcanggactccaccagttcttttgcctggacgaagttgatgcctggaatgtaagttctgatttcctgattaagcttcaa

SEQ ID NO: 137 - DNA, 2259 bp, Homo sapiens
gttctccccttcccggctttcggtccggaggaggcgggagcagcttccctgttctgatcctatcgcgggcggcgcagggccggcttggccttccgtgggacggggaggggggcgggatgtgtcacccaaataccagtggggacggtcggtggtggaaccagccgggcaggtcgggtagagtataagagccggagggagcggccgggcggcagacgcctgcagaccatcccagacgccggagcccgagccccgccgagtccccgcgcctcatccgcccgcgtccggtccgcgttcctccgccccaccatggctcggggccccggcctcgcgccgccaccgctgcggctgccgctgctgctgctggtgctggcggcggtgaccggccacacggccgcgcaggacaactgcacgtgtcccaccaacaagatgaccgtgtgcagccccgacggccccggcggccgctgccagtgccgcgcgctgggctcgggcatggcggtcgactgctccacgctgacctccaagtgtctgctgctcaaggcgcgcatgagcgcccccaagaacgcccgcacgctggtgcggccgagtgagcacgcgctcgtggacaacgatggcctctacgaccccgactgcgaccccgagggccgcttcaaggcgcgccagtgcaaccagacgtcggtgtgctggtgcgtgaactcggtgggcgtgcgccgcacggacaagggcgacctgagcctacgctgcgatgacctggtgcgcacccaccacatcctcattgacctgcgccaccgccccaccgccggcgccttcaaccactcagacctggacgccgagctgaggcggctcttccgcgagcgctatcggctgcaccccaagttcgtggcggccgtgcactacgagcagcccaccatccagatcgagctgcggcagaacacgtctcagaaggccgccggtgaagtggatatcggcgatgccgcctactacttcgagagggacatcaagggcgagtctctattccagggccgcggcggcctggacttgcgcgtgcgcggagaacccctgcaggtggagcgcacgctcatctattacctggacgagattcccccgaagttctccatgaagcgcctcaccgccggcctcatcgccgtcatcgtggtggtcgtggtggccctcgtcgccggcatggccgtcctggtgatcaccaaccggagaaagtcggggaagtacaagaaggtggagatcaaggaactgggggagttgagaaaggaaccgagcttgtaggtacccggcggggcaggggatggggtggggtaccggatttcggtatcgtcccagacccaagtgagtcacgcttcctgattcctcggcgcaaaggagacgtttatcctttcaaattcctgccttccccctcccttttgcgcacacaccaggtttaatagatcctggcctcagggtctcctttctttctcacttctgtcttgaaggaagcatttctaaaatgtatcccctttcggtccaacaacaggaaacctgactggggcagtgaaggaagggatggcacagcgttatgtgtaaaaaacaagtatctgtatgacaacccgggatcgtttgcaagtaactgaatccattgcgacattgtgaaggcttaaatgagtttagatgggaaatagcgttgttatcgccttgggtttaaattatttgatgagttccacttgtatcatggcctacccgaggagaagaggagtttgttaactgggcctatgtagtagcctcatttaccatcgtttgtattactgaccacatatgcttgtcactgggaaagaagcctgtttcagctgcctgaacgcagtttggatgtctttgaggacagacattgcccggaaactcagtctatttattcttcagcttgcccttactaccactgatattggtaatgttcttttttgtaaaatgtttgtacatatgttgtctttgataatgttgctgtaattttttaaaataaaacacgaatttaataaaatatgggaaaggcacaaaccagaagttggcatttgtgaaaagtccctccagatttctatcactttggtctctaatttcccaagacttgtattttttttttatttcaaattataacacttttttttcccccagaagtgggtgtttcatgttgctactctggtgtgtcccaagatatcctaactggccagtgtaaatgctattctttctaaataagattatttggaaacttccttcaaactgcag

SEQ ID NO: 138 - DNA, 6896 bp, Homo sapiens
catgccacatccccggggcgggagggggctacatccccggctttagacgcgcgagtctcaggtcccgctaattacctggcgggtgctgcccacccctgccctcgcgcacctagcgcgtggcagcgggaaggcggggcctgggggagccccacccctggagactgcggctggggcctccctctcctccgcccgcccgcctgccactagctcattgcgcctctcctgcagtctgattgggcaccggctcccattccggctccagcctccaatccgacccccatttcggctgcagcctcggacctagctccggccctcggtctatccggttgcatcctccctccctgttccggatcttatcttgcgccagcgcctactccaggatcccgtagccagacctcaagccatggctggtcccttctcccgtctgctgtccgcccgcccgggactcaggctcctggctttggccggagcggggtctctagccgctgggtttctgctccgaccggaacctgtacgagctgccagtgaacgacggaggctgtatcccccgaggtaacagtgcctgaggcgcgggaggaggcgggggcaggaggtgatgggaacgaaggtgcgggtagaagtgagaatccgggcaacagagaagggctataatcacgaaggccctggagctggagggctgtgcagtctgcagacctcagtggggtgggggtgggggccaaaaccataaagcaagaacattcctggggacctgccaagaccagctctggccctacgagttctagctgcactggctgcccaaatccctaattgtaaagccaggaactatccttttcgctcccctccatctccttccctcatttcctcaattcctctccttaggcttttcccctcctccatccgtagtgttgtgtcatgggaggaaagaactgagcagatctgaagaaactgagctggccagccagaggcaactagaactattaggaaagcatagactctgaaagtccctaaagagattaccaaggtttaccctctttctaattcccctcctcccgcggagcaaagccagacatggccaactggacagctcccaggtaactgcactaggtctaggcgtctgtgaccctccctccatggttactgggtaccccctccccagcgctgagtacccagacctccgaaagcacaacaactgcatggccagtcacctgaccccagcagtctatgcacggctctgcgacaagaccacacccactggttggacgctagatcagtgtatccagactggcgtggacaaccctggccaccccttcatcaagactgtgggcatggtggctggagatgaggagacctatgaggtagggggtccccagagtctccctgatgatccaattcatcttcccagtaatcccagctcctttcccttaaagacctctcactttcccccaagactctgagccccccatacttaagttttctgaaccagtgaaatcaatgcacaattgaagtctggggagggattccctctccttaaccatctctccctcttaactccccttaggtatttgctgacctgtttgaccctgtgatccaagagcgacacaatggatatgacccccggacaatgaagcacaccacggatctagatgccagtaaagtgagttcaaatatcccacttctgatttgcattgcctgtgtacaacactctgtatctccaaccccttcaccttatttcctgactcatggtcattatactgctgagcttttaatcttaatgtaaggaaagaatcatatcttaaggggcagcatatatggagatggaaggatagataagaatgaccatgacccaaggtgggtggtttggggacgggtctgcaatgcccccttcaattccagtgctttcccaaagggcctcttcttccaatgcatgcaggaagaatgcacacagagtcctctaatgcctaaggaaggtctctcctttcccaggggccctcagttcccaccgtgtttctgtgacttacattcatttcccttatctcccagatccgttctggctactttgatgagaggtatgtattgtcctctagagtcagaactggccgaagcatccgaggactcagtctgcctccagcttgcactcgagcagagcgacgagaggtggaacgtgttgtggtggatgcactgagtggcctgaagggtgacctggctggacgttactataggctcagtgagatgacagaggctgaacagcagcagcttattgatgtgagggccttaagagggtgctggttggtgggagcagatggggaaggctgggccagatgagacatgggctctgaaaggcccaggggccaccatgaagattcttaacccaagtcccgttactcttcccaggaccactttctgtttgataagcctgtgtccccgttgctgactgcagcaggaatggctcgagactggccagatgctcgtggaatttggtatgaagctgctcattacctcttttgtcttcatgccctcataaatgctttttttccctctatctctcccaattcttgccttgcctcttgatcactgtccctctccggccctcaggcacaacaatgagaagagcttcctgatctgggtgaatgaggaggatcatacacgggtgatctccatggagaagggtggtaacatgaagagagtgtttgaaagattctgccgaggcctcaaagaggttagagaagactatgtaggggagctaggtgggaggacataaggaaaaccaaagagtagcataaatagattatgtaatttaccaaccaacccaggacatgtcttatagtaaaaaggactatctaggactcactccaggactaaaggtgtaaaccagctgggaccatactgggaaaaccaggacatgtggtcacactaagattaggaaaagaaagagtgtcaggaatcttaggaagtgaacaaggcttttgacagagagtgcaaagaaggaataaatgagatggcacgtcagtgcctgggatgtgtgcagtgggatggtgaggtgtgcagataaggaaaacattcgagcttagattgatgttggcggggagaggttgctgtgttcatgactctaatataaccacccagttctgagacaaggtaggccttgactctggattctatcattcttgttaaagtttcgggtctaggctttaagttgagagttcggagagagactggggaaggtggaggatagaatggttcgagttctagaatatgtggctctagatgagaggttgaactgaatcatcaatcctacatggattgggtctccgtattcaagtctacattagaaatccccataaactcaattcaattcttactgtatgttctcaaacatacagttctattttaggtttgcaaagaaaaagagctcctcttttagattctgagaagtttctactatttttggcaagtaatagataacatattctgactatgagtgggtagggaagtacctttaaattatatgcctcagtttcctcatctgtaaaattgggataatgagattttctacattttaggttgttgtggggattaagtgaaatacaggtaaagtacttggtccacagtaagtgcttaataagtgttaaagtgttagctgcaatattattctggatggaagagtttccccccatgttcagcatgtaagatatcccctatggcatggttccttctgaactataaagaggatccctttactcatgttgggttgtggtctttgtgaccatcattctgctagatcccttgtctcttgaactctaatagtcatcttcatgactacatggttaagtgaagccaaacgccttccccccgccccctattcctatgaatctggcttttctgctctgttttcatctttctctgcattcacacaggtgctccgttcacagctaacagaatgttatcttacctcttcctggcaaagcttacaccttcatcttctgtctgaagggacccttctaagctctaggctcattagcaaagcaaagataatcgatgcatgcagacctcattgaataatcagtcatctctcagttcagtttaccacctctgttcatttccctagatcatccttaatacaccactccttcgagttttcttcttccacataagatattttttcacaatctcattattatgcacatcataattttgcatcatgcatgcatgaaaacaataacaaacctttttcatttaaaaaaagaccaatgtcattcattcacagccaagtttctgttctagacatatttctagtgttcttgtgggtctagctaagggagggtccagggttaatgaaatatccctgatttttcgttaacaaaacctttgtggactcaggtggagagacttatccaagaacgtggctgggagttcatgtggaatgagcgtttgggatacatcttgacctgtccatctaacctgggcactggacttcgggcaggagtgcacatcaaactgcccctgctaagcaaagtaaaggagttgtggggttacagaggggtgtgagtaaggaagggtgggttgtggatggggagggagtggaccctttggaaaggagccaaacatgttgtggctaaagggtcagaggacaggccaggcacagtggctcatgcctctaatcccaacacttgggaggccaaggcaggcagattacttgagcccaggagttcaagaccagcctgggcaacctggtgaaaccccatctctacctacaaatacaaaagttagctgggtgtagtggaggctgaggtgagaggatcacttaagcctgggaagtcgaggcttcagtgagctgtgatcactccagcctgggtgacagagagagaccctgtctaaaaaaaattaaaaaagaaaaaagaaaaaaggaaaaaaaaagttcaggagacagagctctgagcaggttcagggctctttcaggtaggacctagtctctgcctctattgaccctgctcccaatccctatctcctctctaggatagccgcttcccaaagatcctggagaacctaagactccaaaaacgtggtactggaggagtggacactgctgctacaggcggtgtctttgatatttctaatttggaccgactaggcaaatcagaggtgagatcctaagggattaggacaaggagaggtataggtctgcgagggccgaaatatggcagtgagtgagcctccgggatgtaacataatctgaaatgaaattcaggttgagtgggaggcaattggaaatgagcaggcaagtcagtcagtgataaagaaaaactcagactgtaggaagcagatcaaagattagtgtcccttaggtggagctggtgcaactggtcatcgatggagtaaactatttgattgattgtgaacggcgtctggagagaggccaggatatccgcatccccacacctgtcatccacaccaagcattaactccccatcgccagctgatgactcaagattcccaggagttttgctcattctaatgatggcccattctacttgctctggacctgcccccgcatcccctgcctccatcctagtaaagactccttgctatgctgcagctgtctgtgttacttctaatggtggggtgaggagggagcagccttcaggaaatgaaaagaggcagtgggattatttatgatggaaagagactccagatatggcaacccaggaacactgattctcaggtgggtggaaagcattaacattttacccatattcctcatcagcttctgaaaataatcaggatgcacttctgtttgcactttattcattatgacttaagatttctctccccacaatctccttctactgtagagacaggctcatagcaggtggccaaggaagctgatagtcaataccagggaccaggaaggtcgtgaccagtcctggaggccccaggctgtacttcgacctataatagacagggaatgggagtaatatcacaactcagctctccaggagcattgatacttggaaattagcgctctgcctgtagactccttcactccagggatctccctgggtgcactctaagagccagacagcaccaaattaggggtttgattctgggtcaggagatggaggatcaagctgtgcagctgggaactcaccttgctgttctgggctctcctttccctcatgttgggcccatgcaactgctcgtcgctgctcaggactcagaaaggccatttgctcaggagtgacagccacagcctgagcactggtgagactagatagttggatgggactaaacaccacctgagggcaggggtaggaatcagtgcatgcatgtagtccccattgggccctggctctcctgtggtcaccccagtccattaatacttacagcaaatttaggaggagggatgacagaaatggcaagaggagtaacgccctggatctgtccccgcagcagtgctgaaagagccaggtctgggatcccagctgttgaagcaagtggcatccaaacattgtcttagactgaccttccctctcttcaaacctatagaccttctctaactactcccaaagtgccctatcatagaccttccccaatatgtctctagccccttatttaaacaccctcaggcccccaccttaagaattgcagggcagtcttccatccagtccacccatggtatagaaaccaaaccaacttgcaccagcagtggcccagctccccacctgctatggtgccaatttcagtgaagatctcaggcccccagttactgattgggccaaacccaccaggcagtacaagtaggtgggccagaacctccagttgttcctcagagcactgcagatgcagggtgccgaggaagagagctgcttggctgtagaacagtgggaaggaaggaagaa

SEQ ID NO: 139 - DNA, 309 bp, Homo sapiens
ctctcaataggaaagagaagtaattcaagaaagaaatagaaacttcaggcagaacatccattcattcattcattggattgtatatcattgttgcacaatcagaattgataagcactgttcttccactccatttagcaattatgtcacccttttttattgcagttggtttttgaatgtctttcactccttttaaggataaactcctttatggtgtgactgtgtcttattcatctatacttgcagtgggtagatgtcaataaatgttacatacacaaataaataaaatgtttattccatggtaaatttatt

SEQ ID NO: 140 - DNA, 2116 bp, Homo sapiens
cggttctccaagcacccagcatcctgctagacgcgccgcgcaccgacggaggggacatgggcagagcaatggtggccaggctggggctggggctgctgctgctggcactgctcctacccacgcagatttattccagtgaaacaacaactggaacttcaagtaactcctcccagagtacttccaactctgggttggccccaaatccaactaatgccaccaccaaggcggctggtggtgccctgcagtcaacagccagtctcttcgtggtctcactctctcttctgcatctctactcttaagagactcaggccaagaaacgtcttctaaatttccccatcttctaaacccaatccaaatggcgtctggaagtccaatgtggcaaggaaaaacaggtcttcatcgaatctactaattccacaccttttattgacacagaaaatgttgagaatcccaaatttgattgatttgaagaacatgtgagaggtttgactagatgatgaatgccaatattaaatctgctggagtttcatgtacaagatgaaggagaggcaacatccaaaatagttaagacatgatttccttgaatgtggcttgagaaatatggacacttaatactaccttgaaaataagaatagaaataaaggatgggattgtggaatggagattcagttttcattggttcattaattctataaggccataaaacaggtaatataaaaagcttccatcgatctatttatatgtacatgagaaggaatccccaggtgttactgtaattcctcaacgtattgtttcgacggcactaatttaatgccgatatactctagatgaatgtttacattgttgagctattgctgttctcttgggaactgaactcactttcctcctgaggctttggatttgacattgcatttgaccttttaggtagtaattgacatgtgccagggcaatgatgaatgagaatctaccccagatccaagcatcctgagcaactcttgattatccatattgagtcaaatggtaggcatttcctatcacctgtttccattcaacaagagcactacattcttttagctaaacggattccaaagagtagaattgcattgaccacgactaatttcaaaatgctttttattattattattttttagacagtctcactttgtcgcccaggccggagtgcagtggtgcgatctcagatcagtgtaccatttgcctcccgggctcaagcgattctcctgcctcagcctcccaagtagctgggattacaggcacctgccaccatgcccggctaatttttgtaattttagtagagacagggtttcaccatgttgcccaggctggtttagaactcctgacctcaggtgatccacccgcctcggcctcccaaagtgctgggattacaggcttgagcccccgcgcccagccatcaaaatgctttttatttctgcatatgtttgaatactttttacaatttaaaaaaatgatctgttttgaaggcaaaattgcaaatcttgaaattaagaaggcaaaatgtaaaggagtcaaactataaatcaagtatttgggaagtgaagactggaagctaatttgcataaattcacaaacttttatactctttctgtatatacattttttttctttaaaaaacaactatggatcagaatagcaacatttagaacactttttgttatcagtcaatatttttagatagttagaacctggtcctaagcctaaaagtgggcttgattctgcagtaaatcttttacaactgcctcgacacacataaacctttttaaaaatagacactccccgaagtcttttgtttgtatggtcacacactgatgcttagatgttccagtaatctaatatggccacagtagtcttgatgaccaaagtcctttttttccatctttagaaaactacatgggaacaaacagatcgaacagttttgaagctactgtgtgtgtgaatgaacactcttgctttattccagaatgctgtacatctattttggattgtatattgtggttgtgtatttacgctttgattcatagtaacttcttatggaattgatttgcattgaacgacaaactgtaaataaaaagaaacggtg

SEQ ID NO: 141 - DNA, 1834 bp, Homo sapiens
agacggtgctggtgactcgtccacactgctcgcttcggatactccaggcgtctcccgttgcggccgctccctgccttagaggccagccttggacacttgctgcccctttccagcccggattctgggatccttccctctgagccaacatctgggtcctgccttcgacaccaccccaaggcttcctaccttgcgtgcctggagtctgccccaggggcccttgtcctggccatggcccagaagggggtcctggggcctgggcagctgggggctgtggccattctgctctatcttggattactccggtcggggacaggagcggaaggggcagaagctccctgcggtgtggccccccaagcacgcatcacaggtggcagcagtgcagtcgccggtcagtggccctggcaggtcagcatcacctatgaaggcgtccatgtgtgtggtggctctctcgtgtctgagcagtgggtgctgtcagctgctcactgcttccccagcgagcaccacaaggaagcctatgaggtcaagctgggggcccaccagctagactcctactccgaggacgccaaggtcagcaccctgaaggacatcatcccccaccccagctacctccaggagggctcccagggcgacattgcactcctccaactcagcagacccatcaccttctcccgctacatccggcccatctgcctccctgcagccaacgcctccttccccaacggcctccactgcactgtcactggctggggtcatgtggccccctcagtgagcctcctgacgcccaagccactgcagcaactcgaggtgcctctgatcagtcgtgagacgtgtaactgcctgtacaacatcgacgccaagcctgaggagccgcactttgtccaagaggacatggtgtgtgctggctatgtggaggggggcaaggacgcctgccagggtgactctgggggcccactctcctgccctgtggagggtctctggtacctgacgggcattgtgagctggggagatgcctgtggggcccgcaacaggcctggtgtgtacactctggcctccagctatgcctcctggatccaaagcaaggtgacagaactccagcctcgtgtggtgccccaaacccaggagtcccagcccgacagcaacctctgtggcagccacctggccttcagctctgccccagcccagggcttgctgaggcccatccttttcctgcctctgggcctggctctgggcctcctctccccatggctcagcgagcactgagctggccctacttccaggatggatgcatcacactcaaggacaggagcctggtccttccctgatggcctttggacccagggcctgacttgagccactccttccttcaggactctgcgggaggctggggccccatcttgatctttgagcccattcttctgggtgtgctttttgggaccatcactgagagtcaggagttttactgcctgtagcaatggccagagcctctggcccctcacccaccatggaccagcccattggccgagctcctggggagctcctgggacccttggctatgaaaatgagccctggctcccacctgtttctggaagactgctcccggcccgcctgcccagactgatgagcacatctctctgccctctccctgtgttctgggctggggccacctttgtgcagcttcgaggacaggaaaggccccaatcttgcccactggccgctgagcgcccccgagccctgactcctggactccggaggactgagcccccaccggaactgggctggcgcttggatctggggtgggagtaacagggcagaaatgattaaaatgtttgagcac

SEQ ID NO: 142 - DNA, 1517 bp, Homo sapiens
gaattccggcgagtgcgcgctcctcctcgcccgccgctaggtccatcccggcccagccaccatgtccatccacttcagctccccggtattcacctcgcgctcagccgccttctcgggccgcggcgcccaggtgcgcctgagctccgctcgccccggcggccttggcagcagcagcctctacggcctcggcgcctcgcggccgcgcgtggccgtgcgctctgcctatgggggcccggtgggcgccggcatccgcgaggtcaccattaaccagagcctgctggccccgctgcggctggacgccgacccctccctccagcgggtgcgccaggaggagagcgagcagatcaaagccctcaacaacaagtttgcctccttcatcgacaaggtgcggtttctggagcagcagaacaagctgctggagaccaagtggacgctgctgcaggagcagaagtcggccaagagcagccgcctcccagacatctttgaggcccagattgctggccttcggggtcagcttgaggcactgcaggtggatgggggccgcctggagcaggggctgcggacgatgcaggatgtggtggaggacttcaagaataagtacgaagatgaaattaaccgccgcacagctgctgagaatgagtttgtggtcctgaagaaggatgtggatgctgcctacatgagcaaggtggagctggaggccaaggtggatgccctgaatgatgagatcaacttcctcaggaccctcaatgagacggagttgacagagctgcagtcccagatctccgacacatctgtggtgctgtccatggacaacagtcgctccctggacctggacggcatcatcgctgaggtcaaggcacagtatgaggagatggccaaatgcagccgggctgaggctgaagcctggtaccagaccaagtttgagaccctccaggcccaggctgggaagcatggggacgacctccggaatacccggaatgagatttcagagatgaaccgggccatccagaggctgcaggctgagatcgacaacatcaagaaccagcgtgccaagttggaggccgccattgccgaggctgaggagtgtggggagctggcgctcaaggatgctcgtgccaagcaggaggagctggaagccgccctgcagcgggccaagcaggatatggcacggcagctgcgtgagtaccaggaactcatgagcgtgaagctggccctggacatcgagatcgccacctaccgcaagctgctggagggcgaggagagccggttggctggagatggagtgggagccgtgaatatctctgtgatgaattccactggtggcagtagcagtggcggtggcattgggctgaccctcgggggaaccatgggcagcaatgccctgagcttctccagcagtgcgggtcctgggctcctgaaggcttattccatccggaccgcatccgccagtcgcaggagtgcccgcgactgagccgcctcccaccactccactcctccagccaccacccacaatcaca

SEQ ID NO: 143 - DNA, 1493 bp, Homo sapiens
gaattccggcgagtgcgcgctcctcctcgcccgccgctaggtccatcccggcccagccaccatgtccatccacttcagctccccggtattcacctcgcgctcagccgccttctcgggccgcggcgccaggtgcgcctgagctccgctcgccccggcggccttggcagcagcagcctctacggcctcggcgcctcgcggccgcgcgtggccgtgcgctctgcctatgggggcccggtgggcgccggcatccgcgaggtcaccattaaccagagcctgctggccccgctgcggctggacgccgacccctccctccagcgggtgcgccaggaggagagcgagcagatcaaagccctcaacaacaagtttgcctccttcatcgacaaggtggggtttctggagcagcagaacaagctgctggagaccaagtggacgctgctgcaggagcagaagtcggccaagagcagccgcctcccagacatctttgaggcccagattgctggccttcggggtcagcttgaggcactgcaggtggatgggggccgcctggagcaggggctgcggacgatgcaggatgtggtggaggacttcaagaataagtacgaagatgaaattaaccgccgcacagctgctgagaatgagtttgtggtcctgaagaaggatgtggatgctgcctacatgagcaaggtggagctggaggccaaggtggatgccctgaatgatgagatcaacttcctcaggaccctcaatgagacggagttgacagagctgcagtcccagatctccgacacatctgtggtgctgtccatggacaacagtcgctccctggacctggacggcatcatcgctgaggtcaaggcacagtatgaggagatggccaaatgcagccgggctgaggctgaagcctggtaccagaccaagtttgagaccctccaggcccaggctgggaagcatggggacgacctccggaatacccggaatgagatttcagagatgaaccgggccatccagaggctgcaggctgagatcgacaacatcaagaaccagcgtgccaagttggaggccgccattgccgaggctgaggagtgtggggagctggcgctcaaggatgctcgtgccaagcaggaggagctggaagccgccctgcagcgggccaagcaggatatggcacggcagctgcgtgagtaccaggaactcatgagcgtgaagctggccctggacatcgagatcgccacctaccgcaagctgctggagggcgaggagagccggttggctggagatggagtgggagccgtgaatatctctgtgatgaattccactggtggcagtagcagtggcggtggcattgggctgaccctcgggggaaccatgggcagcaatgccctgagcttctccagcagtgcgggtcctgggctcctgaaggcttattccatccggaccgcatccgccagtcgcaggagtgcccgcgactgagccgcctcccaccactccactcc

SEQ ID NO: 144 - DNA, 3370 bp, Homo sapiens
gcccccgcccggcccgccccgctctcctagtcccttgcaacctggcgctgcatccgggccactgtcccaggtcccaggtcccggcccggagctatggagcggcgctggcccctggggctagggctggtgctgctgctctgcgccccgctgcccccgggggcgcgcgccaaggaagttactctgatggacacaagcaaggcacagggagagctgggctggctgctggatcccccaaaagatgggtggagtgaacagcaacagatactgaatgggacacccctctacatgtaccaggactgcccaatgcaaggacgcagagacactgaccactggcttcgctccaattggatctaccgcggggaggaggcttcccgcgtccacgtggagctgcagttcaccgtgcgggactgcaagagtttccctgggggagccgggcctctgggctgcaaggagaccttcaaccttctgtacatggagagtgaccaggatgtgggcattcagctccgacggcccttgttccagaaggtaaccacggtggctgcagaccagagcttcaccattcgagaccttgcgtctggctccgtgaagctgaatgtggagcgctgctctctgggccgcctgacccgccgtggcctctacctcgctttccacaacccgggtgcctgtgtggccctggtgtctgtccgggtcttctaccagcgctgtcctgagaccctgaatggcttggcccaattcccagacactctgcctggccccgctgggttggtggaagtggcgggcacctgcttgccccacgcgcgggccagccccaggccctcaggtgcaccccgcatgcactgcagccctgatggcgagtggctggtgcctgtaggacggtgccactgtgagcctggctatgaggaaggtggcagtggcgaagcatgtgttgcctgccctagcggctcctaccggatggacatggacacaccccattgtctcacgtgcccccagcagagcactgctgagtctgagggggccaccatctgtacctgtgagagcggccattacagagctcccggggagggcccccaggtggcatgcacaggtcccccctcggccccccgaaacctgagcttctctgcctcagggactcagctctccctgcgttgggaacccccagcagatacggggggacgccaggatgtcagatacagtgtgaggtgttcccagtgtcagggcacagcacaggacggggggccctgccagccctgtggggtgggcgtgcacttctcgccgggggcccgggcgctcaccacacctgcagtgcatgtcaatggccttgaaccttatgccaactacacctttaatgtggaagcccaaaatggagtgtcagggctgggcagctctggccatgccagcacctcagtcagcatcagcatggggcatgcagagtcactgtcaggcctgtctctgagactggtgaagaaagaaccgaggcaactagagctgacctgggcggggtcccggccccgaagccctggggcgaacctgacctatgagctgcacgtgctgaaccaggatgaagaacggtaccagatggttctagaacccagggtcttgctgacagagctgcagcctgacaccacatacatcgtcagagtccgaatgctgaccccactgggtcctggccctttctcccctgatcatgagtttcggaccagcccaccagtgtccaggggcctgactggaggagagattgtagccgtcatctttgggctgctgcttggtgcagccttgctgcttgggattctcgttttccggtccaggagagcccagcggcagaggcagcagaggcacgtgaccgcgccaccgatgtggatcgagaggacaagctgtgctgaagccttatgtggtacctccaggcatacgaggaccctgcacagggagccttggactttacccggaggctggtctaattttccttcccgggagcttgatccagcgtggctgatggtggacactgtcataggagaaggagagtttggggaagtgtatcgagggaccctcaggctccccagccaggactgcaagactgtggccattaagaccttaaaagacacatccccaggtggccagtggtggaacttccttcgagaggcaactatcatgggccagtttagccacccgcatattctgcatctggaaggcgtcgtcacaaagcgaaagccgatcatgatcatcacagaatttatggagaatgcagccctggatgccttcctgagggagcgggaggaccagctggtccctgggcagctagtggccatgctgcagggcatagcatctggcatgaactacctcagtaatcacaattatgtccaccgggacctggctgccagaaacatcttggtgaatcaaaacctgtgctgcaaggtgtctgactttggcctgactcgcctcctggatgactttgatggcacatacgaaacccagggaggaaagatccctatccgttggacagcccctgaagccattgcccatcggatcttcaccacagccagcgatgtgtggagctttgggattgtgatgtgggaggtgctgagctttggggacaagccttatggggagatgagcaatcaggaggttatgaagagcattgaggatgggtaccggttgccccctcctgtggactgccctgcccctctgtatgagctcatgaagaactgctgggcatatgaccgtgcccgccggccacacttccagaagcttcaggcacatctggagcaactgcttgccaacccccactccctgcggaccattgccaactttgaccccagggtgactcttcgcctgcccagcctgagtggctcagatgggatcccgtatcgaaccgtctctgagtggctcgagtccatacgcatgaaacgctacatcctgcacttccactcggctgggctggacaccatggagtgtgtgctggagctgaccgctgaggacctgacgcagatgggaatcacactgcccgggcaccagaagcgcattctttgcagtattcagggattcaaggactgatccctcctctcaccccatgcccaatcagggtgcaaggagcaaggacggggccaaggtcgctcatggtcactccctgcgccccttcccacaacctgccagactaggctatcggtgctgcttctgcccgctttaaggagaaccctgctctgcaccccagaaaacctctttgttttaaaagggaggtgggggtagaagtaaaaggatgatcatgggagggagctcaggggttaatatatatacatacatacacatatatatattgttgtaaataaacaggaaatgattttctgcctccatcccacccatcagggctgcaggcact

SEQ ID NO: 145 - DNA, 1452 bp, Homo sapiens
ttggtttctgctgggtgtaggtccttggctggtcgggctccggtgttctgcttctccccgctgagctgctgcctggtgaagaggaagccatggcgctccgagtcaccaggaactcgaaaattaatgctgaaaataaggcgaagatcaacatggcaggcgcaaagcgcgttcctacggcccctgctgcaacctccaagcccggactgaggccaagaacagctcttggggacattggtaacaaagtcagtgaacaactgcaggccaaaatgcctatgaagaaggaagcaaaaccttcagctactggaaaagtcattgataaaaaactaccaaaacctcttgaaaaggtacctatgctggtgccagtgccagtgtctgagccagtgccagagccagaacctgagccagaacctgagcctgttaaagaagaaaaactttcgcctgagcctattttggttgatactgcctctccaagcccaatggaaacatctggatgtgcccctgcagaagaagacctgtgtcaggctttctctgatgtaattcttgcagtaaatgatgtggatgcagaagatggagctgatccaaacctttgtagtgaatatgtgaaagatatttatgcttatctgagacaacttgaggaagagcaagcagtcagaccaaaatacctactgggtcgggaagtcactggaaacatgagagccatcctaattgactggctagtacaggttcaaatgaaattcaggttgttgcaggagaccatgtacatgactgtctccattattgatcggttcatgcagaataattgtgtgcccaagaagatgctgcagctggttggtgtcactgccatgtttattgcaagcaaatatgaagaaatgtaccctccagaaattggtgactttgcttttgtgactgacaacacttatactaagcaccaaatcagacagatggaaatgaagattctaagagctttaaactttggtctgggtcggcctctacctttgcacttccttcggagagcatctaagattggagaggttgatgtcgagcaacatactttggccaaatacctgatggaactaactatgttggactatgacatggtgcactttcctccttctcaaattgcagcaggagctttttgcttagcactgaaaattctggataatggtgaatggacaccaactctacaacattacctgtcatatactgaagaatctcttcttccagttatgcagcacctggctaagaatgtagtcatggtaaatcaaggacttacaaagcacatgactgtcaagaacaagtatgccacatcgaagcatgctaagatcagcactctaccacagctgaattctgcactagttcaagatttagccaaggctgtggcaaaggtgtaacttgtaaacttgagttggagtactatactttacaaactaaaattggcacatgtgcatctgt

SEQ ID NO: 146 - DNA, 4567 bp, Homo sapiens
cctcgcccgccccgcgcgtgactgacagggccactcagggcgcgcgtgcgaggtgctcgcttgggtaatctacctgcgtgggcccgccggcggtaccctgcacagcctgctagaaactgagaccccgggtggtgacagctctggcatcgcccctgggtcctcgggaagaggggacagaaggtcccgagtctcccaggccacacgaagcaagtcactgctcttcctggcctcagtttactcctcctgataaaggaggccataatagtgcctcacctggctgttggctctttctctttagggcaaggcaggttggaggggaaaataggacctgtgcttaccgccggagcagggcgagagtgattctgggccagttctgaacctctctgagattcggagatctcttgtcagtggggcttctggacaactgagtgggctgattgatgcgcggcccagcacgcggcccagtgctcgaggcagggagcgtgtttatcaagagggataaacttgatacgaactctgtacgaaggaaggtgtaggtggatggaggggtgtgtgctgccactgagcacaagaacccacggggtggcctgccaaagttcaaaacgagggagacaggttgatctggacccaggaactacagtgctgaatcctaaaccggggaaagatgagacctagaagagggaggtggtaacctaattggagggtgaggagggaaagagcctgccacagatggggcatctataggggtgctgttgataacagagcagctgacttaagcccgaagtgggtacttctccctgggcagatgggaggtctgggacaggctcctctggcagaagggctcctggccaccctgtcctaaggtgggtcagtcacttcctccttcaccagttccacagcatcttactatgagcttggcattcgaggcttctcttggcagggccctgcactcctagcctctccttgcacattgcacccccattccagagaggtttagttaaaggcgggggttaccaagtcagtcagatcttgggcaagtcaccactcctccagagcctcagtttccttatctggaaagtggaggtcatggcaacccgccaacctggttggatgggagcctgagctgttgtgttgcaccttgcctggggcccacgactttgtagctcctgtcctgcactgggcttatgttttcattcattccagaaaccttttcagagagtccctttggggagtgtgggggacaggagggaaagaaacctggtccttgtagccgttcgtctgctccctgccctgggcagaggacatggggactcaggccagcctgagatcactgggaccagaggaggggctggaggatactacacgcaggggtgggctgggctgggctgggctgggccaggaatgcagcggggcagggctatttaagtcaagggccggctggcaaccccagcaagctgtcctgtgagccgccagcatggatgacatctacaaggctgcggtgagggacagggctgggtagggctggggtgggcaggcccactgggggctcactcagctgagagtgcggggttagtagccccagggaagtggtggggaccaaggagaaggcctacgtgccttcaacccaggccctcacagggacagtgattctggtgtttgaggatgcagaagggggtagggggttccgggtctgaagggtggtggaggaggttgcagctttctgatcgtgtctcactctctgtttccaagtgtctgtggtctgtggcactgtcgctcagccacatgtctctgcatttgtctctggacgtttttgccttcctcttttcatctcttcctcctgagctgtctgagtccccattactgtctccctgtccccaacccccactttctgcccctcacattctgcttctcacatgctcaaaatctgccacccactccagcccttggcgggccgaagatgcttggagggtggagggtgtgagaggaggggtctgtagagcctgagtcctgggctggagatggggctttgaagtttgaggcagggaagttctggacatgagggagaaccaaggaagaaggaacagagaactggggccccagctcccatcatgcctggcaggctcagggctcagtggcttagctaggggtgagagcgagggaatgagggctggagagtggtcaccccaagcccctgcaacctcctgggtcactgagggtcttcagatgctattctatcctgggtggtggtacctccccaacccagagcaaggacatcctggcatggccagctgtccccaggggaacccctccctcagcctccctcactcctgggcagggaagtgctatagccagctctgggggcacgcctgcttatcctgtgggagtccatggagccggggtggggacagccctccacccagtgcccatacaaggcctggcggagttggggactaattttggcttctgaggcggcactagcagccagggggccagataacgctgccccctgcatgccaaagtccccagaacaatcaccaggtttcactttgttcctcgttaaaaatagcccagtggccaccctggtcaggttaccgtgggtggcttgcctgcctccacactggttttattatcccaacttagggacagctgtccttccggcccacccagcttgagtttcatcaggggccgaaagggcattgagtggtcactgactattgttactgagggtcaccttggtcctgaagggggtgcccacctgtcaccctggccctgagcccagtcgcagtgaggccagctgggtcacgtcagggctttgggggcagggagggaggactgagacctccactctgtggcctggaaatagccagcctcctccagctccagccttctcacctgtggaatgggttggttcctacgcagcagctatacctgagtctgagaccttgagattccctttccttctaggtagagcagctgacagaagagcagaaaaatggtgagaatccctatcacacatgtgggagaccagcgggtccaggctggcatggggaccccttatcagaagaggaccccaggccagagaccagaggcttggtccctcttgctctgccctcagagaggtctccgagggaggtgggcaggttggcaggtggccccagggttctggccctccgtggtcctggctgctgagccctgactaccgtgccccccaacccctgaacacagagttcaaggcagccttcgacatcttcgtgctgggcgctgaggatggctgcatcagcaccaaggagctgggcaaggtgatgaggatgctgggccagaaccccacccctgaggagctgcaggagatgatcgatgaggtggacgaggacggtgagcccccctcctccccaggctccagaagaaccccagctggctgggggctggaatgctggctctgtttagctgggagcaatttagcctatccgagccttggttgcctcatctataaaatgggcataagggctacacaagcctggcgtttggtgtgaggatgcggtgagaacatgggggttcgtgtcgaaggtgctgcctgcagtacctaccctggcctctgtaacggccatgctgcccacccccaggcagcggcacggtggactttgatgagttcctggtcatgatggttcggtgcatgaaggacgacagcaaagggaaatctgaggaggagctgtctgacctcttccgcatgtttgacaagtgagcacgtgacccttgacctctgaccctgacccacactcaagccgagctgtacaggagggcagtctcagattccaggcctagggaccctgtggcctctgcctgataggggagagggatgccccatctcccagtgtccctgctctgcctcctggggcatgggtggggctgcctcatgccctccccacagccctaccctgagccccctccccacagaaatgctgatggctacatcgacctggatgagctgaagataatgctgcaggctacaggcgagaccatcacggaggacgacatcgaggagctcatgaaggacggagacaagaacaacgacggccgcatcgactatgatggtaagcgggtgggtgggctgatctcctgcctccatgccctgcccagcccctaccctcaacccacacctgcccctctttccacagagttcctggagttcatgaagggtgtggagtagatgctgaccttcacccagagctgcctatgcccagcctccaactccagctgagtcctggggttggggagggggtcggggtcccaggacctgagcctggccatgtcctcaaccccaaatcccccgactccctccccagatctgtcctgggggatgcaaataaagcctgctctcccaaggtctgctatctggctctggtgtccctgggccgtggactcatccccaggacccactcttacccaatggccgcttccttccctgtcctaggcaggctggctgcagagcctggcgcctgaccaccgctccacactgccttctgcaggggggtgagatgagatcggagactgccgtgtggcctgccctgct

SEQ ID NO: 147 - DNA, 1194 bp, Homo sapiens
ggccggagggagcccgcgctcggggcggcggctggaggcagcgcaccgagttcccgcgaggatccatgacctgacggggccccggagccgcgctgcctctcgggtgtcctgggtcggtggggagcccagtgctcgcaggccggcgggcgggccggagggctgcagtctccctcgcggtgagaggaaggcggaggagcgggaaccgcggcggcgctcgcgcggcgcctgcggggggaagggcagttccgggccgggccgcgcctcagcagggcggcggctcccagcgcagtctcagggcccgggtggcggcggcgactggagaaatcaagttgtgcggtcggtgatgcccgagtgagcggggggcctgggcctctgcccttaggaggcaactcccacgcaggccgcaaagggctctcgcggccgagaggcttcgtttcggtttcgcggcggcggcggcgttgttggctgaggggacccgggacacctgaatgcccccggccccggctcctccgacgcgatggggaaggtgctatccaaaatcttcgggaacaaggaaatgcggatcctcatgttgggcctggacgcggccggcaagacaacaatcctgtacaagttgaagctgggccagtcggtgaccaccattcccactgtgggtttcaacgtggagacggtgacttacaaaaatgtcaagttcaacgtatgggatgtgggcggccaggacaagatccggccgctctggcggcattactacactgggacccaaggtctcatcttcgtagtggactgcgccgaccgcgaccgcatcgatgaggctcgccaggagctgcaccgcattatcaatgaccgggagatgagggacgccataatcctcatcttcgccaacaagcaggacctgcccgatgccatgaaaccccacgagatccaggagaaactgggcctgacccggattcgggacaggaactggtatgtgcagccctcctgtgccacctcaggggacggactctatgaggggctcacatggttaacctctaactacaaatcttaatgagcattctccacccatcccctggaaggagagaaatcaaaaacccattcataggattatcgccaccatcacctctttcaattgccactttctcttcttttgaatttgaactctggagttactgttctacagtttggcggggacggggc

SEQ ID NO: 148 - DNA, 3866 bp, Homo sapiens
ggaattcctttttttttttttttgagatggagtttcactcttgttggccaggctggagtgcaatggcacaatctcagcttactgcaacctccgcctcccgggttcaagcgattctcctgcctcagcctctcaagtagctgggattacaggcatgtgccaccacccctggctaactaatttcttttctatttagtagagatggggtttcaccatgttggtcaggctggtcttgaactcctgacctcaggtgatccacttgccttggcctcccaaagtgctaggattacagccgtgaaactgtgcctggctgattctttttttgttgttggatttttgaaacagggtctcccttggtcgcccaggctggagtgcagtggtgcgatcttggctcactataacctccacctcctggtttcaagtgatcctcccactttagcctcctgagtagctgtgattacaggcgtgcaccaccacacccggctaatttttgtatttttattagagacagggtttcaccatgttggccaggctgttctcaaactcctggactcaagggatccgcctgcctccacttcccaaagtcccgagattacaggtgtgagtcaccatgcctgaccttataattcttaagtcattttttctggtccatttcttccttagggtcctcacaacaaatctgcattaggcggtacaataatccttaacttcatgattcacaaaaggaagatgaagtgattcatgatttagaaaggggaagtagtaagcccactgcacactcctggatgatgatcctaaatccagatacagtaaaaatggggtatgggaaggtagaatacaaaatttggtttaaattaattatctaaatatctaaaaacatttttggatacattgttgatgtgaatgtaagactgtacagacttcctagaaaacagtttgggttccatcttttcatttccccagtgcagttttctgtagaaatggaatccgaggatttaagtggcagagaattgacaattgattccataatgaacaaagtgagagacattaaaaataagtttaaaaatgaagaccttactgatgaactaagcttgaataaaatttctgctgatactacagataactcgggaactgttaaccaaattatgatgatggcaaacaacccagaggactggttgagtttgttgctcaaactagagaaaaacagtgttccgctaagtgatgctcttttaaataaattgattggtcgttacagtcaagcaattgaagcgcttcccccagataaatatggccaaaatgagagttttgctagaattcaagtgagatttgctgaattaaaagctattcaagagccagatgatgcacgtgactactttcaaatggccagagcaaactgcaagaaatttgcttttgttcatatatcttttgcacaatttgaactgtcacaaggtaatgtcaaaaaaagtaaacaacttcttcaaaaagctgtagaacgtggagcagtaccactagaaatgctggaaattgccctgcggaatttaaacctccaaaaaaagcagctgctttcagaggaggaaaagaagaatttatcagcatctacggtattaactgcccaagaatcattttccggttcacttgggcatttacagaataggaacaacagttgtgattccagaggacagactactaaagccaggtttttatatggagagaacatgccaccacaagatgcagaaataggttaccggaattcattgagacaaactaacaaaactaaacagtcatgcccatttggaagagtcccagttaaccttctaaatagcccagattgtgatgtgaagacagatgattcagttgtaccttgttttatgaaaagacaaacctctagatcagaatgccgagatttggttgtgcctggatctaaaccaagtggaaatgattcctgtgaattaagaaatttaaagtctgttcaaaatagtcatttcaaggaacctctggtgtcagatgaaaagagttctgaacttattattactgattcaataaccctgaagaataaaacggaatcaagtcttctagctaaattagaagaaactaaagagtatcaagaaccagaggttccagagagtaaccagaaacagtggcaagctaagagaaagtcagagtgtattaaccagaatcctgctgcatcttcaaatcactggcagattccggagttagcccgaaaagttaatacagagcagaaacataccacttttgagcaacctgtcttttcagtttcaaaacagtcaccaccaatatcaacatctaaatggtttgacccaaaatctatttgtaagacaccaagcagcaataccttggatgattacatgagctgttttagaactccagttgtaaagaatgactttccacctgcttgtcagttgtcaacaccttatggccaacctgcctgtttccagcagcaacagcatcaaatacttgccactccacttcaaaatttacaggttttagcatcttcttcagcaaatgaatgcatttcggttaaaggaagaatttattccatattaaagcagataggaagtggaggttcaagcaaggtatttcaggtgttaaatgaaaagaaacagatatatgctataaaatatgtgaacttagaagaagcagataaccaaactcttgatagttaccggaacgaaatagcttatttgaataaactacaacaacacagtgataagatcatccgactttatgattatgaaatcacggaccagtacatctacatggtaatggagtgtggaaatattgatcttaatagttggcttaaaaagaaaaaatccattgatccatgggaacgcaagagttactggaaaaatatgttagaggcagttcacacaatccatcaacatggcattgttcacagtgatcttaaaccagctaactttctgatagttgatggaatgctaaagctaattgattttgggattgcaaaccaaatgcaaccagatacaacaagtgttgttaaagattctcaggttggcacagttaattatatgccaccagaagcaatcaaagatatgtcttcctccagagagaatgggaaatctaagtcaaagataagccccaaaagtgatgtttggtccttaggatgtattttgtactatatgacttacgggaaaacaccatttcagcagataattaatcagatttctaaattacatgccataattgatcctaatcatgaaattgaatttcccgatattccagagaaagatcttcaagatgtgttaaagtgttgtttaaaaagggacccaaaacagaggatatccattcctgagctcctggctcatccatatgttcaaattcaaactcatccagttaaccaaatggccaagggaaccactgaagaaatgaaatatgttctgggccaacttgttggtctgaattctcctaactccattttgaaagctgctaaaactttatatgaacactatagtggtggtgaaagtcataattcttcatcctccaagacttttgaaaaaaaaaggggaaaaaaatgatttgcagttattcgtaatgtcagataggaggtataaaatatattggactgttatactcttgaatccctgtggaaatctacatttgaagacaacatcactctgaagtgttatcagcaaaaaaaattcagtgagattatctttaaaagaaaactgtaaaaatagcaaccacttatggcactgtatatattgtagacttgttttctctgttttatgctcttgtgtaatctacttgacatcattttactcttggaatagtgggtggatagcaagtatattctaaaaaactttgtaaataaagttttgtggctaaaatga

SEQ ID NO: 149 - DNA, 3175 bp, Homo sapiens
tgcttaaaaaaacacaacaggattttcgaagaatcctttcttagaaaacaaacaaaaaaaccaaacaaaaacgtactttctccccactagtttacaccacaggaagcgagagagctgctgccactgctgctaccacaggaagacacagcagggagaagccctagtgcctctgccggctgcccaggacctggtatcggcccacagaccaagtcctccacagagggcgagccagggtggagaagagccagcccagtgacccaaacatccccgataaaacacccactgcttaagaggcaggctcggatggactatagctttgataccacagccgaagacccttgggttaggatttctgactgcatcaaaaacttatttagccccatcatgagtgagaaccatggccacatgcctctacagcccaatgccagcctgaatgaagaagaagggacacagggccacccagatgggaccccaccaaagctggacaccgccaatggcactcccaaagtttacaagtcagcagacagcagcactgtgaagaaaggtcctcctgtggctcccaagccagcctggtttcgccaaagcttgaaaggtttgaggaatcgtgcttcagagccaagagggctccctgatcctgccttgtccacccagccagcacctgcttccagggagcacctaggatcacacatccgggcctcctcctcctcctcctccatcaggcagagaatcagctcctttgaaacctttggctcctctcaactgcctgacaaaggagcccagagactgagcctccagccctcctctggggaggcagcaaaacctcttgggaagcatgaggaaggacggttttctggactcttggggcgaggggctgcacccactcttgtgccccagcagcctgagcaagtactgtcctcggggtcccctgcagcctccgaggccagagacccaggtgtgtctgagtcccctcccccagggcggcagcccaatcagaaaactttcccccctggcccggacccgctcctaaggctgctgtcaacacaggctgaggaatctcaaggcccagtgctcaagatgcctagccagcgagcacggagcttccccctgaccaggtcccagtcctgtgagacgaagctacttgacgaaaagaccagcaaactctattctatcagcagccaagtgtcatcggctgtcatgaaatccttgctgtgccttccatcttctatctcctgtgcccagactccctgcatccccaaggcaggggcatctccaacatcatcatccaacgaagactcagctgcaaatggttctgctgaaacatctgccttggacacggggttctcgctcaacctttcagagctgagagaatatacagagggtctcacggaagccaaggaagacgatgatggggaccacagttcccttcagtctggtcagtccgttatctccctgctgagctcagaagaattaaaaaaactcatcgaggaggtgaaggttctggatgaagcaacattaaagcaattagacggcatccatgtcaccatcttacacaaggaggaaggtgctggtcttgggttcagcttggcaggaggagcagatctagaaaacaaggtgattacggttcacagagtgtttccaaatgggctggcctcccaggaagggactattcagaagggcaatgaggttctttccatcaacggcaagtctctcaaggggaccacgcaccatgatgccttggccatcctccgccaagctcgagagcccaggcaagctgtgattgtcacaaggaagctgactccagaggccatgcccgacctcaactcctccactgactctgcagcctcagcctctgcagccagtgatgtttctgtagaatctacagcagaggccacagtctgcacggtgacactggagaagatgtcggcagggctgggcttcagcctggaaggagggaagggctccctacacggagacaagcctctcaccattaacaggattttcaaaggagcagcctcagaacaaagtgagacagtccagcctggagatgaaatcttgcagctgggtggcactgccatgcagggcctcacacggtttgaagcctggaacatcatcaaggcactgcctgatggacctgtcacgattgtcatcaggagaaaaagcctccagtccaaggaaaccacagctgctggagactcctaggcaggacatgctgaagccaaagccaataacacacagctaacacacagctcccataaccgctgattctcagggtctctgctgccgccccacccagatgggggaaagcacaggtgggcttcccagtggctgctgcccaggcccagaccttctaggacgccacccagcaaaaggttgttcctaaaataagggcagagtcacactggggcagctgatacaaattgcagactgtgtaaaaagagagcttaatgataatattgtggtgccacaaataaaatggatttattagaattccatatgacattcatgcctggcttcgcaaaatgtttcaagtactgtaactgtgtcatgattcacccccaaacagtgacatttatttttctcatgaatctgcaatgtgggcagagattggaatgggcagctcatctctgtcccacttggcatcagctggcgtcatgcaaagtcatgcaaaggctgggaccacctgagatcattcactcatacatctggccgttgatgttggctgggaactcacctggggctgctggcctgaatgcttataggtggcctctccttgtggcctgggctcctcacaacatggtgtctggattcccaggatgagcatcccaggatcgcaagagccacgtagaagctgcatcttgtttatacctttgccttggaagttgcatggcatcacctccaccatactccatcagttagagctgacacaaacctgcctgggtttaaggggagaggaaatattgctggggtcatttatgaaaaatacagtttgtcacatgaaacatttgcaaaattgtttttggttggattggagaagtaatcctagggaagggtggtggagccagtaaatagaggagtacaggtgaagcaccaagctcaaagcgtggacaggtgtgccgacagaaggaaccagcgtgtatatgagggtatcaaataaaattgctactacttacctacc

SEQ ID NO: 150 - DNA, 479 bp, Homo sapiens
  misc_feature (1)...(479): n=a,t,g or c
tactttcagaacattttctattataagtcagaaggaaaaaagcttactgtatatgacagtcttcctgaaacctaagagaaagttttaaccaggccctatggcaatgcagaaacactaatacattttacagtgaaaacctactttaacacatctcaaaatgataatccgtataanactttctagttctaatttgcactctacgtgaaccaatatttttcttttcttaacacatactgctcttctataccaaacacttgccctttaaccttcagataaaaacctcaaataccaaaaaatgcaacaagcttttgaggtgttgggaattgttggttgttaaaatcccttttattttataataaattatacaggcaatccttggctttttattaccacactgggattgcttctgtacacagctaagttgcctgaagcatgggaaacttggacttctccatctgacacgntctgggagcctccag

SEQ ID NO: 151 - DNA, 472 bp, Homo sapiens
  misc_feature (1)...(472): n=a,t,g or c
gcatcataatgagtaaggatgtcaataattgccatgaagtacacctccttcctaggcgagttttcatggcacttaattccatagacgtcgatgttcggatcgaactccccgggagccaggggtggtgagctgttcagtgtattcccggggctatctgggggggttcccaccgggtggtngccatcgctctcgccctcctcctccccatcgttctcctcacactccacttcctcctgttcggctctctccacatcatgaattcccaccagcagactgtagtccatgagcttcanctgggccagaaactcaacatccttttttagtttttccaggaagaccttcttgctgttgtcatcaatataaatcttttggccctcattaatgaaatcattatctttcagagttgggcagttctttgggccttttctttggtcactagcttctctagccactggtagagccctttaagtcg

SEQ ID NO: 152 - DNA, 488 bp, Homo sapiens
  misc_feature (1)...(488): n=a,t,g or c
gcgaccgcagtngcaactccagctggggccgtgcggacgaagattctgccagcagttcggtccgactgcgacggcggcggcgacagtcnagggtgcagcgcgggccctnggggtcttgcaaggctgagctgacgccgcagaggtcgtgtcacgtcccacgaccttgacgccgtcggggacagccggaacanagcccggtgaaggcgggaggctcgaagatcccctcgggaagggcggcccgagagatacgcaggtgcaggtggccgccggatcccagccgcacttctggcgtgagtatccggactgcaggggccgggacgaggtcggtgttcgaatcttcccagctctggttggcccgcaacctgggttaagcaggtcctcgtagcgtttccgcaactctccggaatctggagtcttccggtgtgcaactctgaatggtcccgggaaacttgcgcggctcgcatcggntaaagacagggtgcccccat

SEQ ID NO: 153 - DNA, 503 bp, Homo sapiens
  misc_feature (1)...(503): n=a,t,g or c
gactttgatatgtttatattatagatataatacataaaacatctagagtgagactctacgttctccccaaaagaagagaaccaagccgtccttccctgctcccagccccagtgatgcgttggcgggaggcacctcccttcccgaccaggagccagggcctctgggggacaagccttgtgggcagcccaggccggagggctggggaaagctgagggcaaaggagaacccccctcacctcattggtcccccaggatcaaaagtaatcccaaaaccaaaaggaaagggagtctcagacccttcccccagcttgccgacggagagtctcnttttggcaagtatccgagcaaaaccaaaacaaaacaaaaaccaaataaaatggtggtttagcagagacgcgcacattcacattggcacaagggcactgctggggggcacagagggccagatacaagtgtttgatatcggcttgataaagcaaaatatttggnaaagctttgtcataa

SEQ ID NO: 154 - DNA, 464 bp, Homo sapiens
  misc_feature (1)...(464): n=a,t,g or c
gcgtgatcatctaaattcaaactggaaagctttactcttaagactactactcgtgctctggggttccgaacagatggtcctgatgaaacataatcagtgctgtcaatttcaattggaaaatgcttctcacatttctcgtcactgtccagtgcggctggccactcagtgcaaaaatctttaagggcttcacagtgctttttaattgctacaggagtcaaatgcagaaaattgggaatctttaaaagttctagatttccctcctttgccatggnaccgcccttttttactggataacccattcgaacaggaagaggtactgcagagggtttaaatgggtgctgcaactgggtaaacactaggccagtcctggtcaacagccattttctctgtcctaggaggtagtgcctttcttcttgggtggcctttcatttctgggtgttctttccggcagctaggtgtcggga

SEQ ID NO: 155 - DNA, 437 bp, Homo sapiens
  misc_feature (1)...(437): n=a,t,g or c
catatagtcagttaaactttattatttacaagttaaattacacagcagctttacacagcatgagatggaaaggaaggaaggagagaaacgaggagaggaagctggctcctgagattcttggctgcctccacctccttctcttgggcgtacagtcttcagtgctgcctccactccaaggtcaaggatcagggcttggaacacaggtttaagtcaggttctggctctgacagccccagggccaccagggctcccactagcagcttcttcacaggcgttggaggtgagtgtgaaggcatcagctgcagggagaaaggttaatgccagttngggggaggcacacaaatgttctacccttttaaccccacccagccctaccctaagggactccaatttatctaagacgatgggcgacaaatganggccacntggaatttcaa

SEQ ID NO: 156 - DNA, 327 bp, Homo sapiens
tttttttttttttggcttcagaattttattttaaaggttatacaggatcagattatgagactgttgcaaacctgggtaatctgtcaggtgtatgagatgaaagagaaaagccagtcaaatgaaaagacaaagtaaatatgtttttcattttatagaaccattcagtagtaatgtaaccattcagttaaccactggttaactgttatgataactgaatgttaatcagttaaccattcaaaactaaccattcagatttctctatacatgagccacattattaatgtgatctctaaatcttttggtaagttaaaatattcgtgtttatta

SEQ ID NO: 157 - DNA, 437 bp, Homo sapiens
ggaaaatcaaaatttttttattaatttactggatttcctatacctaacaatccttaaaacaactatcaacagctgcaacacaaaccacaggcaaaatgaaaaacagatgccccagacagcaccccaccacatggcacacacttaataaggaacaaaatcctacagggtgctgacataactcgctttaagcatgcaatgattcctgcagtgctccctggcaatcaacctctctgcaccctggggctggatacttcaaagtctttgttctcttaacaggtttgaagtcaacatggcaagttaaggacaagttagatgagatccccctagttcataacgtgagttcctcttgctctccaatgttcatccacaagtacagggtccaatcccctataagagatgggcttaagcatcccaatggggaaacagcctggccagcc

SEQ ID NO: 158 - DNA, 453 bp, Homo sapiens
ttcaatataaatgtgtaattttaatatttaatttaaaataaaaccaaggctggattgggttgggaaagaacgtttgatttgcagaagaatataggaatttttttaatcacgacattacaagtcatttgtgaaaacagccttcctcctgccaccggtccctatacaacctgcttaggaaatatggaggtgaatcatcccccttacctcttccctaccagggcttggttctccccaaaatccaaaggagaaataaatgtcttccgttgcctcttcccatttttacagtcagcttctaaccccttgcaaagccctgaatcagagccaagcacctcagaaaatgagggtcccttggttctcttattgaagttgggcacatgtggtcagagaagccccaaggaaggccacagggactgacacctttacttttggaatttgtgcagccagtttgtcagg

SEQ ID NO: 159 - DNA, 436 bp, Homo sapiens
  misc_feature (1)...(436): n=a,t,g or c
tttgctgtaatacacaaaagttttatttttgactttcttcttttctgaaggcaaaataaaatagaactgaacatcagtgaattttgtacaacaaaaacagcttttaatatggaatagtccatgaacattttaaaatctcggaatggcttccctttttcaaagtcatgctttcttgcggtccacaaggagttggcacagaggagatggtggcagcggcgggtgaggtgagtggaggacagggcttctctcagatccgtgttagctggtgccacagactggatgggaggatgctctccacttttctccatgacaaagtttaagggggcaaacaaagtgctgaggaaagcntttgcgaagacccccataagttccgggaactgatgtgtcaggagggccagcatgctgttgaaggaacataatccagcagtaaagagaa

SEQ ID NO: 160 - DNA, 270 bp, Homo sapiens
  misc_feature (1)...(270): n=a,t,g or c
cacggctcctgttttattgccttcgggtgtccggagcacctgactgccccggggtctaataatttaaggtgccgagaacaggtcaggacaaggggtcgcaaaanaggggctgggggcagntggttacaaaatatacccccaccccacaacaaacaggctagaggagaccagcctggctgtgtcggganggggcgggcagagggcgcccgaccagccttcagagagacagagccacggccagcgccccagagggagtggcggagacaggac

SEQ ID NO: 161 - DNA, 139 bp, Homo sapiens
aatgcagccaaaagtgatatttgcttttctcagaaccataatcgatacaagatgcagtgaccaattcattccttaaaacacctgggctccttaagcggctagaagacacaagttacatccagcccatcagggagccaga

SEQ ID NO: 162 - DNA, 282 bp, Homo sapiens
  misc_feature (1)...(282): n=a,t,g or c
ttttttttttngtgattatacgttttattagactcngggaggggtaatggcaaggncttcatcangtgttccttcaaattaaaaaaaaaaaatacaaaagctacgtagaaaacgtcagatcagacgactaaactttcccgactcagggccaagttcttcttgagcctgcgctctcgggacgcctgcgagtcggtctccgagtacgggggcggcgcgggcgggtagtaggcctcttcctcctcctccttgtggggtctcctcctctcctccgaccccttcttc

SEQ ID NO: 163 - DNA, 248 bp, Homo sapiens
  misc_feature (1)...(248): n=a,t,g or c
ttttttttttgcttttagaatactggtgcattttttattaaagaagagaataaagcatttgtaaatatatttctctcacgtatacttcaaaggtgacgctggtctgccactacagagctggggagcagacaggctggagctcttcccccaacccttccacactcctctcccccagataacagacacacacggagggcagggagctgcntagcctcaaaggncaaaagtttcccagttgcacgtacaga

SEQ ID NO: 164 - DNA, 429 bp, Homo sapiens
  misc_feature (1)...(429): n=a,t,g or c
aganaattnnttttattcagcctgatatagatcatttatgaaaaactaacagcaaacatcatcctcaatggtaaaaggctgaaggatttttctctaaggttaggaacaaggcaaatgcctgctcttgccactctattcagcatagtgctgggagttctagacagagcagttaggcaaggaaaaggaaatctaagggcatccaaattgggaaagggagggaaggtaaaattatctctgtttggccaatggatatggattttatatggtatggaataggaaaacccttaaaggattccncccaggggccnggggncggggtgggcctcacggcctttttaattccccagcactttggggggaggggcccagggtgggggnggggtttgctttgagggnccaggggggtttccaggacttggccgggggggg

SEQ ID NO: 165 - DNA, 331 bp, Homo sapiens
tttttttttgatggtggttgtctctaatatttatttgtctggttataaaattaatatgtgaggagcattggatttggtgagaacgttttgaaccctagctgtcacgtgccacctgcgggatctagaccagtgacttctcagaactgccatttcctcatctggtagacaggatggtaagccctgtcttgctcactccacgtatgggcagtgcagatgaaatgagatcacagaggggaagcaattggcaggctggaaagtgctgacaaatggaaggggttgtgtcaccaccctcagctgaggtagtaccaaggtccaagctcctgcccctccc

SEQ ID NO: 166 - DNA, 459 bp, Homo sapiens
  misc_feature (1)...(459): n=a,t,g or c
tttttttttttttttttaataattaaaagccattttattgtcaatactgactgtcatacaactgaaacacttggaaggaaaatcacaagaatccacaaaaggacagattcagagaagtgcaagggacaaagtatctacaatagaaaatcatttcgtgacattgacttctttctgtccagctgtaaaagagggaacacagagtcaatatctatagagcacgtttcaattacactaagantttaaaaaagaaaaagaaaataaagaaaattattgtattgcagagttttccantgaccacacaattagccagggctttaagcttcttctcttggtcgtcatttcccttgctgtcattctgtgacctcctgggtgaatctgtgggctgacacatcacaagtgtgttaacnatttcttgggngttaccgtcagtgctcaggtcngtaggctgggaaaagtctc

SEQ ID NO: 167 - DNA, 444 bp, Homo sapiens
  misc_feature (1)...(444): n=a,t,g or c
ttttttttttttttttttttttgcatatttataactgtttaataaactattcaaaattagcatctaaaataattatactttggacacacgaaggcatatatttggngagaacattgtaattttcattttgtaaactatatattctatattcaagtaataacacagcattgcctatacagaactgaggcctgcgctgagacccaaaacttgtcttttcctaaatgcaccactacggggggctantangnggtctgtccagatgctaagaccaggggacttcaaaatctccatcctgcggctttacaggtctccggggcagttagganctttatctttcagagggtgggagggggcctgacaggnggcttttggaaaccttttgtggcaactcctcccgggggcacattttgggggnctcagttccaacccaaatgccttttttna

SEQ ID NO: 168 - DNA, 292 bp, Homo sapiens
gtggagcaggaggttttattgtaaagaggccgattgtacagagcaaagattgttctgacacggggggctgggtggtgggacccagaggccagagctgggtgaaggatgaggggtggcatcgcccatccaggcagtgggcagggcagggaggactaaacggctgcctcccagttcccttccctgcccctcattactgggtaagagggagccaggctatttccacggatccaggagaatatagcaggagaccctcaccaccccacaccatgccccaaggatacgggaggtgccc

SEQ ID NO: 169 - DNA, 294 bp, Homo sapiens
  misc_feature (1)...(294): n=a,t,g or c
ttttttttttttttttttttttgctgtnaaanaactttaatggttgatntgggagtcacaagggaggtatntttgctccaagggttcttcagtgccatcctcaaagctggttagtgcagggaggtagggcagagttggttccagttttcttccaggaagggtttagggaggtcccagcgagccccaggantgagtccctcggtaccatgggcaaccacantttaagaggggnttntgccancccntgnagcctaccccaggtccagcagaggaacaggaggccagantggcaaa

SEQ ID NO: 170 - DNA, 426 bp, Homo sapiens
  misc_feature (1)...(426): n=a,t,g or c
aatttnacacgcactnaaanntttttattngaaaaagtcttagagactcagtaaggcacgaagtccaggnngggggcagggtccctgggcgcggtgnaccaggnccancagggcttcagtnccggatcccccactntggtngagnttccccgctctctccagcagccccgctcccgtggacctgaggacaagggagccctttcatccgagatgctgagtatgggcaacagggaggaggggaaggaagaggcagctccaccgtgtgggtntgggcggggggatggggctctgcaggagcttnatgctccttcggaccctgaaggcacttacgactaggaaggcccggcttcaggggcaggtcctgggancttgggcaggggtngggggctcagctnggcttatttngtttttgggngaaggngcaat

SEQ ID NO: 171 - DNA, 534 bp, Homo sapiens
caggactcgacgtcggacctgatcccggccccacctctgagcaaggtccctctgcagcagaacttccaggacaaccaattccaggggaagtggtatgtggtaggcctggcagggaatgcaattctcagagaagacaaagacccgcaaaagatgtatgccaccatctatgagctgaaagaagacaagagctacaatgtcacctccgtcctgtttaggaaaaagaagtgtgactactggatcaggacttttgttccaggttgccagcccggcgagttcacgctgggcaacattaagagttaccctggattaacgagttacctcgtccgagtggtgagcaccaactacaaccagcatgctatggtgttcttcaagaaagtttctcaaaacagggagtacttcaagatcacgctctacgggagaaccaaggagctgacttcggaactaaaggagaacttcatccgcttctccaaatctctgggcctccctgaaaaccacatcgtcttccccgtccccatcgatcaatgcatcgacggc

SEQ ID NO: 172 - DNA, 401 bp, Homo sapiens
gggcttggggggtttattaagtgatgctttagtctcagtctctgccagcaactgggagtggggtgactccactcaccccaggatttcccagacttgctattttagaggagagaggcaggaagccaactatcctctaagccacagcttgggaagctaggctagtactggggtgggggcagcagagctgagaccctccaccccgagcccctagcctgtgctatcctcccagcctgagggggaggagctgaggcaatcctggctgcagcctcccacacacagccctgctcttggtgcgccattcactgccctgagctattcatgatctctgctcccagatattcacctcaacactccaaaagccagccccttcaggtcttcagtcctgcggaaggcaaaaggag

SEQ ID NO: 173 - DNA, 199 bp, Homo sapiens
  misc_feature (1)...(199): n=a,t,g or c
ttttaccagttctcgattttatttaggactcaaattaacaccaaccaaacatatcactaactcacttatttccacatttccaaagttggattgtgctgcaaatccatacatttgtgctcactacacatttttttaattacattcattgagnggctccaaagcatcagtccaataaacatttttccagcccgaaaaccat

SEQ ID NO: 174 - DNA, 365 bp, Homo sapiens
  misc_feature (1)...(365): n=a,t,g or c
ntccanacatnttcattttattnagtggaaagcttacaaaaggnccactngccccttccctccccacgngacacgtcattccttccaatgcaaantctggtntatccacactcacttctgcgtcaccggtttcccccaacaaggcacaaagggcgggtgcttccaaaggatcccttggtcctggcagcgggactgtcagtgctgggtttcttntgcaantggnggctgnaanagggactnttagttnactcngacactgggatcttccttactcctgaagaggggcttggctccaggcccgcagtactcggttgtagatgagcttgaagaggangaggtggaagagggtgattagggaggccacg

SEQ ID NO: 175 - DNA, 358 bp, Homo sapiens
aaggggggtatttgtttaatacctctctctctcccatttttgttttatacaagttgcatttctagccaccacatcattggcatcttattccagaagaatagcattagttctagcacttgccaggcgggtgcatgcgcaagagtccgtacgcccacctgctgcggtagttctcccgcctggcctctccatcaaggtggagactgccctcatggttttccagctcgtagagacgaacaggtcccggctcttggtcagccgaaccatgagccggcccacatagaagccactgatttggcccacaccgtcatttctccccatggacaggaggaacgtcagtgcacccggcttgtaggctggg

SEQ ID NO: 176 - DNA, 413 bp, Homo sapiens
  misc_feature (1)...(413): n=a,t,g or c
tataatagctaccatttattgagcacctactttgtgccaggcantttacatacatttgtgcttataattcttacaacaacctcgggaggtaggcattattatcaccatttgacatatgagaaaacagaggcttagcaaggttaagcggcttgttcaaggtcacagagctggtagataagtgatagaatcagcacttgagttgtgcatctgtgagggccccaaagctttcatcaggcattttccacactgagaaaataaagaaggtagaggagtgggtgtattagtctgttttcacactgctgataaagacataccccgagactggggtaatttatggaagganaaaggagggttttaatggaactcacagttccctgtgggctggggagggcctcaccaatcatgggtgggaa

SEQ ID NO: 177 - DNA, 306 bp, Homo sapiens
  misc_feature (1)...(306): n=a,t,g or c
ttttttttttcagttttnaagggttatttattaaaccccttggttctgaccccaagctgagtgggactcagattcagaccctgcactcagagagccccctgacttggggaagacagagcagagaaaggcagccccantntggccaggntcagctggaaggaaggacaaggggntgggagaacccaganttcaagagntctgggaaacagggaacggcnttccagacggagggcacaccttgggcatgggtaaggaaagcccatcgttttttntaggaagcatggatggatgaaacggggtcccagc

SEQ ID NO: 178 - DNA, 422 bp, Homo sapiens
  misc_feature (1)...(422): n=a,t,g or c
taaanntgatttaaaaattactcttttacttttattacaataaataattatcaataataganttaaacaatttcaattaaaacctactgcatnctttggggtttacagcagcagancaaacataaatccagttgaaagggaaggcttccagantccagtgacangaacagtctggtcttgattattcgggcnagcaatgggaaacactgatacagataatgcaaaaacaatgaaatgcatcggcatactctctttgtacatcacattatctgacactttaaaatattccagctangtaatttaggcaggccatgaggctctgtttctgcacagtnggggttctcccccagcaggcccacagcacactgctcccngggccacccttgggccngaacggggcccatcatcangcggcctggagg

SEQ ID NO: 179 - DNA, 375 bp, Homo sapiens
  misc_feature (1)...(375): n=a,t,g or c
tcgcagcaattttaattcaatcccacgcccctgtccagcaggaaacccctttatagaaaacccaaatcctcatcttggagtttctccttcagccagggcagcacttgaaagaggttgatgtgaaagtctcgggcgtgannggttacctgcttttgccgnttctggtttttgcagacatccactactccccagctgattacaccaacttgaatgaaacganttctcttgtgaactatcaaggggccgccagantcacctntgcaagtnttggggtcagcatagggactcactcctccagtacaaagggaaccgaggggtgaccacctntgaggatgtcccttgantttgtcatagcctgggggcaatatttgaggc

SEQ ID NO: 180 - DNA, 495 bp, Homo sapiens
  misc_feature (1)...(495): n=a,t,g or c
gagctaggtattaagattatattaaataatttaactgtattttgaaaatgattatgctgtcatttccttctctgtataaaaagtgctgggattgcaggcatgagcactgcacccaacccctggaaaactaaatttttaagtgcttatttttatagaagtttgaaaatttaatgcaggcaggtgtgtaataaattatttttgaattgaacattaaaattctgcttcttaaagtcagcactcaacttggacatgttgaaattagaatctattcttgtatttgatagacaaaatatgtgggaaagattttttgcatgactttnctctcattttattcttccataatgtatttctactataaaanagaatccaacttggggttatatttgtccattnactttgttctgttnaggatttcgtccagttgtttttgggaaaaattcnaggaaatcagggatggacanatgcagcctttcccggggntgccgggacnggggg

SEQ ID NO: 181 - DNA, 112 bp, Homo sapiens
ttaagaaataagaaatacatatatattgaaaaagtgataaatgtaggtatcctgagattctcaactataaaaagaacagtaatagcaatttgaataatacacataaaatcct

SEQ ID NO: 182 - DNA, 2790 bp, Homo sapiens
gcagagcgggacagccaggaggaagggcagcttggcagagcctcaggatggacccccttggggacacgctgcggcgactgcgggaggccttccacgcggggcgcacgcggccagctgagttccgggctgcgcagctccaaggcctgggccgcttcctgcaagaaaacaagcagcttctgcacgacgcactggcccaggacctgcacaagtcagccttcgagtcggaggtgtctgaggttgccatcagccagggcgaggtcaccctggccctcaggaacctccgggcctggatgaaggacgagcgtgtgcccaagaacctggccacgcagctggactccgccttcatccggaaggagccctttggcctggtcctcatcattgcgccctggaactatccgctgaacctgacgctggtgcccctcgtgggagccctcgctgcagggaactgtgtggtgctgaagccatcggagattagcaagaacgtcgagaagatcctggccgaggtgctgccccaatacgtggaccagagctgctttgctgtggtgctgggcgggccccaggagacggggcagctgctagagcacaggttcgactacatcttcttcacagggagccctcgtgtgggcaagattgttatgactgctgccgccaagcacctgacacctgtcaccctggagctggggggcaagaacccttgctacgtggacgacaactgcgacccccagaccgtggccaaccgcgtggcctggttccgctacttcaacgccggccagacctgcgtggcccccgactacgtcctatgcagccctgagatgcaggagaggctgctgcctgccctgcagagcaccatcacccgtttctatggcgacgacccccagagctccccaaacctgggccgcatcatcaaccagaaacagttccagcggctgcgggcattgctgggctgcggccgtgtggccattgggggccagagcgatgagagcgatcgctacatcgcccccacggtgctggtggatgtgcaggagatggagcctgtgatgcaggaggagatcttcgggcccatcctgcccatcgtgaacgtgcagagcttggacgaggccatcgagttcatcaaccggcgggagaagcccctggccctgtacgccttctccaacagcagccaggtggtcaagcgggtgctgacccagaccagcagcgggggcttctgtgggaacgacggcttcatgcacatgaccctggccagcctgccttttggaggagtgggtgccagtgggatgggccggtaccatggcaagttctccttcgacaccttctcccaccatcgcgcctgcctcctgcgcagcccggggatggagaagctcaacgccctccgctacccgccgcaatcgccgcgccgcctgaggatgctgctggtggccatggaggcccaaggctgcagctgcacactgctctgagcccttccccaggcccaggctgtagaccaccatgacagctgtcgcctgcggctggtggagacggggcctgggctcccgggcccgaggaggaaaaggattgccaaggctccagggcacccctcaaagcagcgcctgcctcctccctcctgggtcttccctctccctgcctcagcctcctccctcagccgctcccaaccatgagagccgaggtgggaggcatgggaaacagtgcagtgactcaccccctgcccccgcaccaaccacccatattcaggagaagaggacagacacggcacctctgagtcacccctctcctgtggagcgggcgtccgaggggcctggcgatctgactcaggccacaccatggaatcactgcatccaaggccattcctgccctctctgagtctcagtttttccatttgttcagtggagagaattaaccattgatacctcctggctgggtgaggcggctcacacctgtaatcccagcactttgggaggccgaggcaggcggatcacctgaaatcaggagttcaagatcagcctggctaacatggcgaaaccccgtctctactaaaaatacaaaaattagcctggcgtggtggcgcatgcctgtaatcccagctactcaggaggctaaggcaggagaatcgcttgaacccgggaggtggaggttgccgtgagctgagattgcgtcactgaactccggcctgggtgacagaaggaggctctgccttaaaaaaaaaaaaaaaaaaaaaaacctcctgggactgttgcaaggatgaaatgaaggattgagggattgagggattgctgagctggagctccaggtgtcctatctttctcagtggggtggcacggagcggggccgcctccctcttctctccaggcaggtggggctgtggttatgcgatagggtctcccttccctccagcccatgccaggagcttgtaactctttatcctcatggtgcccactacgagtcatactcttccccatgctgctcatcctcctgggccccatccactcagccaaagcagaatgcagggtttcctgcctgacaacccttctcacctcccaagtcccacttttgaacaagctgatgattctgaaactggcccaatttcctaaaagcgggggtgcttgagaaacctacatttggacaatgagaggctgctcctgcggcctgcgggccacctcctcttccttggctcctgctttctttttagactatatcaacctacaactttagtcgggaagagggacaggggtggacctgagtttcgtctcctgtctctctggctgatgtcacctgaataaagccttcttccctggc

SEQ ID NO: 183 - DNA, 577 bp, Homo sapiens
caccactgctttagaggccagatttttctggaggggattcctctacacatgctacctccagttagcaggaggggaaggaagggttgggagtcttggggagtctcaccatcaactcctcctcctgctgctgttccatttgcctcagacatggagttggagctgctgcggggcagccaggccatcatgctgcgctcagcggacctgacaggactggagaagcgtgtggagcagatccgtgaccacatcaatgggcgcgtgctctactatgccacctgcaagtgatgctacagcttccagcccgttgccccactcatctgccgcctttgcttttggttggggggcagattgggttggaatgctttccatctccaggagactttcatgtagcccaaagtacagcctggaccacccctggtgtgtacctagtaagattaccctgagctgcagctgagcctgagccaatgggacagttacacttgacagacaaagatggtggagattggcatgccattgaaactaagagctctcaagtcaaggaagctgggctgggcagtatcccccgcctttagttctccac

SEQ ID NO: 184 - DNA, 6124 bp, Homo sapiens
acaaaaggtcctgtgctcacctgggacccttctggacgttgccctgtgtacctcttcgactgcctgttcatctacgacgaaccccgggtattgaccccagacaacaatgccacttcatattggggacttcgtctgggattccaaggtgcattcattgcaaagttccttaaatattttctcactgcttcctactaaaggacggacagagcatttgttcttcagccacatactttccttccactggccagcattctcctctattagactagaactgtggataaacctcagaaaatggccacccagcagaaagcctctgacgagaggatctcccagtttgatcacaatttgctgccagagctgtctgctcttctgggcctagatgcagttcagttggcaaaggaactagaagaagaggagcagaaggagcgagcaaaaatgcagaaaggctacaactctcaaatgcgcagtgaagcaaaaaggttaaagacttttgtgacttatgagccgtacagctcatggataccacaggagatggcggccgctgggttttacttcactggggtaaaatctgggattcagtgcttctgctgtagcctaatcctctttggtgccggcctcacgagactccccatagaagaccacaagaggtttcatccagattgtgggttccttttgaacaaggatgttggtaacattgccaagtacgacataagggtgaagaatctgaagagcaggctgagaggaggtaaaatgaggtaccaagaagaggaggctagacttgcgtccttcaggaactggccattttatgtccaagggatatccccttgtgtgctctcagaggctggctttgtctttacaggtaaacaggacacggtacagtgtttttcctgtggtggatgtttaggaaattgggaagaaggagatgatccttggaaggaacatgccaaatggttccccaaatgtgaatttcttcggagtaagaaatcctcagaggaaattacccagtatattcaaagctacaagggatttgttgacataacgggagaacattttgtgaattcctgggtccagagagaattacctatggcatcagcttattgcaatgacagcatctttgcttacgaagaactacggctggactcttttaaggactggccccgggaatcagctgtgggagttgcagcactggccaaagcaggtcttttctacacaggtataaaggacatcgtccagtgcttttcctgtggagggtgtttagagaaatggcaggaaggtgatgacccattagacgatcacaccagatgttttcccaattgtccatttctccaaaatatgaagtcctctgcggaagtgactccagaccttcagagccgtggtgaactttgtgaattactggaaaccacaagtgaaagcaatcttgaagattcaatagcagttggtcctatagtgccagaaatggcacagggtgaagcccagtggtttcaagaggcaaagaatctgaatgagcagctgagagcagcttataccagcgccagtttccgccacatgtctttgcttgatatctcttccgatctggccacggaccacttgctgggctgtgatctgtctattgcttcaaaacacatcagcaaacctgtgcaagaacctctggtgctgcctgaggtctttggcaacttgaactctgtcatgtgtgtggagggtgaagctggaagtggaaagacggtcctcctgaagaaaatagcttttctgtgggcatctggatgctgtcccctgttaaacaggttccagctggttttctacctctcccttagttccaccagaccagacgaggggctggccagtatcatctgtgaccagctcctagagaaagaaggatctgttactgaaatgtgcatgaggaacattatccagcagttaaagaatcaggtcttattccttttagatgactacaaagaaatatgttcaatccctcaagtcataggaaaactgattcaaaaaaaccacttatcccggacctgcctattgattgctgtccgtacaaacagggccagggacatccgccgatacctagagaccattctagagatcaaagcatttcccttttataatactgtctgtatattacggaagctcttttcacataatatgactcgtctgcgaaagtttatggtttactttggaaagaaccaaagtttgcagaagatacagaaaactcctctctttgtggcggcgatctgtgctcattggtttcagtatccttttgacccatcctttgatgatgtggctgttttcaagtcctatatggaacgcctttccttaaggaacaaagcgacagctgaaattctcaaagcaactgtgtcctcctgtggtgagctggccttgaaagggtttttttcatgttgctttgagtttaatgatgatgatctcgcagaagcaggggttgatgaagatgaagatctaaccatgtgcttgatgagcaaatttacagcccagagactaagaccattctaccggtttttaagtcctgccttccaagaatttcttgcggggatgaggctgattgaactcctggattcagataggcaggaacatcaagatttgggactgtatcatttgaaacaaatcaactcacccatgatgactgtaagcgcctacaacaattttttgaactatgtctccagcctcccttcaacaaaagcagggcccaaaattgtgtctcatttgctccatttagtggataacaaagagtcattggagaatatatctgaaaatgatgactacttaaagcaccagccagaaatttcactgcagatgcagttacttaggggattgtggcaaatttgtccacaagcttacttttcaatggtttcagaacatttactggttcttgccctgaaaactgcttatcaaagcaacactgttgctgcgtgttctccatttgttttgcaattccttcaagggagaacactgactttgggtgcgcttaacttacagtactttttcgaccacccagaaagcttgtcattgttgaggagcatccacttcccaatacgaggaaataagacatcacccagagcacatttttcagttctggaaacatgttttgacaaatcacaggtgccaactatagatcaggactatgcttctgcctttgaacctatgaatgaatgggagcgaaatttagctgaaaaagaggataatgtaaagagctatatggatatgcagcgcagggcatcaccagaccttagtactggctattggaaactttctccaaagcagtacaagattccctgtctagaagtcgatgtgaatgatattgatgttgtaggccaggatatgcttgagattctaatgacagttttctcagcttcacagcgcatcgaactccatttaaaccacagcagaggctttatagaaagcatccgcccagctcttgagctgtctaaggcctctgtcaccaagtgctccataagcaagttggaactcagcgcagccgaacaggaactgcttctcaccctgccttccctggaatctcttgaagtctcagggacaatccagtcacaagaccaaatctttcctaatctggataagttcctgtgcctgaaagaactgtctgtggatctggagggcaatataaatgttttttcagtcattcctgaagaatttccaaacttccaccatatggagaaattattgatccaaatttcagctgagtatgatccttccaaactagtaaaattaattcaaaattctccaaaccttcatgttttccatctgaagtgtaacttcttttcggattttgggtctctcatgactatgcttgtttcctgtaagaaactcacagaaattaagttttcggattcattttttcaagccgtcccatttgttgccagtttgccaaattttatttctctgaagatattaaatcttgaaggccagcaatttcctgatgaggaaacatcagaaaaatttgcctacattttaggttctcttagtaacctggaagaattgatccttcctactggggatggaatttatcgagtggccaaactgatcatccagcagtgtcagcagcttcattgtctccgagtcctctcatttttcaagactttgaatgatgacagcgtggtggaaattgccaaagtagcaatcagtggaggtttccagaaacttgagaacctaaagctttcaatcaatcacaagattacagaggaaggatacagaaatttctttcaagcactggacaacatgccaaacttgcaggagttggacatctccaggcatttcacagagtgtatcaaagctcaggccacaacagtcaagtctttgagtcaatgtgtgttacgactaccaaggctcattagactgaacatgttaagttggctcttggatgcagatgatattgcattgcttaatgtcatgaaagaaagacatcctcaatctaagtacttaactattctccagaaatggatactgccgttctctccaatcattcagaaataaaagattcagctaaaaactgctgaatcaataatttgtcttggggcatattgaggatgtaaaaaaagttgttgattaatgctaaaaaccaaattatccaaaattattttattaaatattgcatacaaaagaaaatgtgtaaggcttgctaaaaaacaaaacaaaacaaaacacagtcctgcatactcaccaccaagctcaagaaataaatcatcaccaatacctttgaggtccctgagtaatccaccccagctaaaggcaaacccttcaatcaagtttatacagcaaaccctccattgtccatggtcaacagggaaggggttggggacaggtctgccaatctatctaaaagccacaatatggaagaagtattcaatttatataataaatggctaacttaacggttgaatcactttcatacatggatgaaacgggtttaacacaggatccacatgaatcttctgtgggccaagagatgttccttaatccttgtagaacctgttttctatattgaactagctttggtacagtagagttaacttactttccatttatccactgccaatataaagaggaaacaggggttagggaaaaatgacttcattccagaggcttctcagagttcaacatatgctataatttagaattttcttatgaatccactctacttgggtagaaaatattttatctctagtgattgcatattatttccatatcatagtatttcatagtattatatttgatatgagtgtctatatcaatgtcagtgtccagaatttcgttcctaccagttaagtagttttctgaacggccagaagaccattcgaaattcatgatactactataagttggtaaacaaccatacttttatcctcatttttattctcactaagaaaaaagtcaactcccctccccttgcccaagtatgaaatatagggacagtatgtatggtgtggtctcatttgtttagaaaaccacttatgactgggtgcggtggctcacacctgtaatcccagcactttgggaggctgaggcgggcgaatcatttgaggtgaggaattcgagaccagcctggccagcatggtgaaaccccatctctactaaaaatacaaaaattagccaggtgtggtggcacatgcctgtagtcccagccactagggcggctgagacgcaagacttgcttgaacccgggaggcagaggttgcagtgagccaagatggcgccactgcattccagcctgggcaacagagcaagaccctgtctgtctcaaaacaaaaaacaaaaccacttatattgctagctacattaagaatttctgaatatgttactgagcttgcttgtggtaaccatttataatatcagaaagtatatgtacaccaaaacatgttgaacatccatgttgtacaactgaaatataaataattttgtcaattatacctaaataaaactggaaaaaaatttctggaagtttatatctaaaaatgttaatagtgcgtacctctaggaagtgggcctggaagccattcttacttttcagtctctcccattctgtactgttttttgttttactttcgtgcctgcattatttttctatttaaaacaaaaataaatctagtttagcact

SEQ ID NO: 185 - DNA, 1468 bp, Homo sapiens
gacaccgtggggggtaggtttgatgccactcaggcatttgtcggggagctcagccagttcaacatatgggaccgcgtccttcgcgcacaagaaattgtcaacatcgccaactgctccacaaacatgccgggcaacatcatcccgtgggtggacaataacgtcgatgtgttcggaggggcctccaagtggcccgtggagacgtgtgaggaggctctccttgacttgtagccgccttctcctctgtccaggaggccgggatcaggctgttgccatggaagttcagggccatagactgccccacttaaactcttgtcagtctgggctcagggttcccagagctcattccccaggaatctctaagaccagggctggggcagtgtctgtcactggcttgtttgttccctaccaatattctgttgctgtttgaagtagtgccagggtcccctgggaagatgcccccaagacacctgccccaagtgggtggatatctgccttcctgctgcaagtggaggcaggtccagcagcccctcttcagagcccctgtaaatgctatcgcagcctgagtcctgccgccttccagttccttggtgtcccgtgcaccccttctgtctgtcccctttcatgctgtgcagccgtcccgctggagtggccatgtcccttgtgcattgagtgcatccccgctggtgactaagctcgcagcaagcgctacccccgatctgcaaaagggcctctccctttgtgttctatacattgtgaatcttcccgtctgaagaacgcccagcctgcccagacaaagccccgccttccccaaagcagaggggctgtctgtgtctccagaaaggggacatcggggggggaggggggctcagaaaggagaagggctgtgatctccggtcccttcccccatcatccttccttagactgatgctttgactgaatcatcactagctatggcattaaaaggcctctcttctcatctggtgccaaaggttccgttgcagctttttacaaccatccggtgtggtttggaggatttgttttttttttttcccaacagaaaagaacagccattagaagaaggctcccattttctgatgttccgccccactgtgaagagtgtgctcgttttaaattcatgttgattcttgtaagcactggactgtcttcatcaagtatttcccctacagaactcctcaagaaaaacagagatcatttggctagagattgtctgagtgactccaagctactcactgtattggacgggagtagtaatttattttaaagataaagtgactaagtggggaaatttataaagctaaatattatatattttatttttcatacatgtttgaagtgcaaatctgtggatattccatttgtaggaccaagtcgacatgcccatcctgacattgtatgctacgagaactcttctgatgatggaatttcgattaaagtgcactgaaagatg

SEQ ID NO: 186 - DNA, 10211 bp, Homo sapiens
gagaggtcgttttcccgtccccgagagcaagtttatttacaaatgttggagtaataaagaaggcagaacaaaatgagctgggctttggaagaatggaaagaagggctgcctacaagagctcttcagaaaattcaagagcttgaaggacagcttgacaaactgaagaaggaaaagcagcaaaggcagtttcagcttgacagtctcgaggctgcgcctcagaagcaaacacagaaggttgaaaatgaaaaaaccgagggtacaaacctgaaaagggagaatcaaagattgatggaaatatgtgaaagtctggagaaaactaagcagaagatttctcatgaacttcaagtcaaggagtcacaagtgaatttccaggaaggacaactgaattcaggcaaaaaacaaatagaaaaactggaacaggaacttaaaaggtgtaaatctgagcttgaaagaagccaacaagctgcgcagtctgcagatgtctctctgaatccatgcaatacaccacaaaaaatttttacaactccactaacaccaagtcaatattatagtggttccaagtatgaagatctaaaagaaaaatataataaagaggttgaagaacgaaaaagattagaggcagaggttaaagccttgcaggctaaaaaagcaagccagactcttccacaagccaccatgaatcaccgcgacattgcccggcatcaggcttcatcatctgtgttctcatggcagcaagagaagaccccaagtcatctttcatctaattctcaaagaactccaattaggagagatttctctgcatcttacttttctggggaacaagaggtgactccaagtcgatcaactttgcaaatagggaaaagagatgctaatagcagtttctttgacaattctagcagtcctcatcttttggatcaattaaaagcgcagaatcaagagctaagaaacaagattaatgagttggaactacgcctgcaaggacatgaaaaagaaatgaaaggccaagtgaataagtttcaagaactccaactccaactggagaaagcaaaagtggaattaattgaaaaagagaaagttttgaacaaatgtagggatgaactagtgagaacaacagcacaatacgaccaggcgtcaaccaagtatactgcattggaacaaaaactgaaaaaattgacggaagatttgagttgtcagcgacaaaatgcagaaagtgccagatgttctctggaacagaaaattaaggaaaaagaaaaggagtttcaagaggagctctcccgtcaacagcgttctttccaaacactggaccaggagtgcatccagatgaaggccagactcacccaggagttacagcaagccaagaatatgcacaacgtcctgcaggctgaactggataaactcacatcagtaaagcaacagctagaaaacaatttggaagagtttaagcaaaagttgtgcagagctgaacaggcgttccaggcgagtcagatcaaggagaatgagctgaggagaagcatggaggaaatgaagaaggaaaacaacctccttaagagtcactctgagcaaaaggccagagaagtctgccacctggaggcagaactcaagaacatcaaacagtgtttaaatcagagccagaattttgcagaagaaatgaaagcgaagaatacctctcaggaaaccatgttaagagatcttcaagaaaaaataaatcagcaagaaaactccttgactttagaaaaactgaagcttgctgtggctgatctggaaaagcagcgagattgttctcaagaccttttgaagaaaagagaacatcacattgaacaacttaatgataagttaagcaagacagagaaagagtccaaagccttgctgagtgctttagagttaaaaaagaaagaatatgaattgaaagaagagaaaactctgttttcttgttggaaaagtgaaaacgaaaaacttttaactcagatggaatcagaaaaggaaaacttgcagagtaaaattaatcacttggaaacttgtctgaagacacagcaaataaaaagtcatgaatacaacgagagagtaagaacgctggagatggacagagaaaacctaagtgtcgagatcagaaaccttcacaacgtgttagacagtaagtcagtggaggtagagacccagaaactagcttatatggagctacagcagaaagctgagttctcagatcagaaacatcagaaggaaatagaaaatatgtgtttgaagacttctcagcttactgggcaagttgaagatctagaacacaagcttcagttactgtcaaatgaaataatggacaaagaccggtgttaccaagacttgcatgccgaatatgagagcctcagggatctgctaaaatccaaagatgcttctctggtgacaaatgaagatcatcagagaagtcttttggcttttgatcagcagcctgccatgcatcattcctttgcaaatataattggagaacaaggaagcatgccttcagagaggagtgaatgtcgtttagaagcagaccaaagtccgaaaaattctgccatcctacaaaatagagttgattcacttgaattttcattagagtctcaaaaacagatgaactcagacctgcaaaagcagtgtgaagagttggtgcaaatcaaaggagaaatagaagaaaatctcatgaaagcagaacagatgcatcaaagttttgtggctgaaacaagtcagcgcattagtaagttacaggaagacacttctgctcaccagaatgttgttgctgaaaccttaagtgcccttgagaacaaggaaaaagagctgcaacttttaaatgataaggtagaaactgagcaggcagagattcaagaattaaaaaagagcaaccatctacttgaagactctctaaaggagctacaacttttatccgaaaccctaagcttggagaagaaagaaatgagttccatcatttctctaaataaaagggaaattgaagagctgacccaagagaatgggactcttaaggaaattaatgcatccttaaatcaagagaagatgaacttaatccagaaaagtgagagttttgcaaactatatagatgaaagggagaaaagcatttcagagttatctgatcagtacaagcaagaaaaacttattttactacaaagatgtgaagaaaccggaaatgcatatgaggatcttagtcaaaaatacaaagcagcacaggaaaagaattctaaattagaatgcttgctaaatgaatgcactagtctttgtgaaaataggaaaaatgagttggaacagctaaaggaagcatttgcaaaggaacaccaagaattcttaacaaaattagcatttgctgaagaaagaaatcagaatctgatgctagagttggagacagtgcagcaagctctgagatctgagatgacagataaccaaaacaattctaagagcgaggctggtggtttaaagcaagaaatcatgactttaaaggaagaacaaaacaaaatgcaaaaggaagttaatgacttattacaagagaatgaacagctgatgaaggtaatgaagactaaacatgaatgtcaaaatctagaatcagaaccaattaggaactctgtgaaagaaagagagagtgagagaaatcaatgtaattttaaacctcagatggatcttgaagttaaagaaatttctctagatagttataatgcgcagttggtgcaattagaagctatgctaagaaataaggaattaaaacttcaggaaagtgagaaggagaaggagtgcctgcagcatgaattacagacaattagaggagatcttgaaaccagcaatttgcaagacatgcagtcacaagaaattagtggccttaaagactgtgaaatagatgcggaagaaaagtatatttcagggcctcatgagttgtcaacaagtcaaaacgacaatgcacaccttcagtgctctctgcaaacaacaatgaacaagctgaatgagctagagaaaatatgtgaaatactgcaggctgaaaagtatgaactcgtaactgagctgaatgattcaaggtcagaatgtatcacagcaactaggaaaatggcagaagaggtagggaaactactaaatgaagttaaaatattaaatgatgacagtggtcttctccatggtgagttagtggaagacataccaggaggtgaatttggtgaacaaccaaatgaacagcaccctgtgtctttggctccattggacgagagtaattcctacgagcacttgacattgtcagacaaagaagttcaaatgcactttgccgaattgcaagagaaattcttatctttacaaagtgaacacaaaattttacatgatcagcactgtcagatgagctctaaaatgtcagagctgcagacctatgttgactcattaaaggccgaaaatttggtcttgtcaacgaatctgagaaactttcaaggtgacttggtgaaggagatgcagctgggcttggaggaggggctcgttccatccctgtcatcctcttgtgtgcctgacagctctagtcttagcagtttgggagactcctccttttacagagctcttttagaacagacaggagatatgtctcttttgagtaatttagaaggggctgtttcagcaaaccagtgcagtgtagatgaagtattttgcagcagtctgcaggaggagaatctgaccaggaaagaaaccccttcggccccagcgaagggtgttgaagagcttgagtccctctgtgaggtgtaccggcagtccctcgagaagctagaagagaaaatggaaagtcaagggattatgaaaaataaggaaattcaagagctcgagcagttattaagttctgaaaggcaagagcttgactgccttaggaagcagtatttgtcagaaaatgaacagtggcaacagaagctgacaagcgtgactctggagatggagtccaagttggcggcagaaaagaaacagacggaacaactgtcacttgagctggaagtagcacgactccagctacaaggtctggacttaagttctcggtctttgcttggcatcgacacagaagatgctattcaaggccgaaatgagagctgtgacatatcaaaagaacatacttcagaaactacagaaagaacaccaaagcatgatgttcatcagatttgtgataaagatgctcagcaggacctcaatctagacattgagaaaataactgagactggtgcattgaaacccacaggagagtgctctggggaacagtccccagataccaattatgagcctccaggggaagataaaacccagggctcttcagaatgcatttctgaattgtcattttctggtcctaatgctttggtacctatggatttcctggggaatcaggaagatatccataatcttcaactgcgggtaaaagagacatcaaatgagaatttgagattacttcatgtgatagaggaccgtgacagaaaagttgaaagtttgctaaatgaaatgaaagaattagactcaaaactccatttacaggaggtacaactaatgaccaaaattgaagcatgcatagaattggaaaaaatagttggggaacttaagaaagaaaactcagatttaagtgaaaaattggaatatttttcttgtgatcaccaggagttactccagagagtagaaacttctgaaggcctcaattctgatttagaaatgcatgcagataaatcatcacgtgaagatattggagataatgtggccaaggtgaatgacagctggaaggagagatttcttgatgtggaaaatgagctgagtaggatcagatcggagaaagctagcattgagcatgaagccctctacctggaggctgacttagaggtagttcaaacagagaagctatgtttagaaaaagacaatgaaaataagcagaaggttattgtctgccttgaagaagaactctcagtggtcacaagtgagagaaaccagcttcgtggagaattagatactatgtcaaaaaaaaccacggcactggatcagttgtctgaaaaaatgaaggagaaaacacaagagcttgagtctcatcaaagtgagtgtctccattgcattcaggtggcagaggcagaggtgaaggaaaagacggaactccttcagactttgtcctctgatgtgagtgagctgttaaaagacaaaactcatctccaggaaaagctgcagagtttggaaaaggactcacaggcactgtctttgacaaaatgtgagctggaaaaccaaattgcacaactgaataaagagaaagaattgcttgtcaaggaatctgaaagcctgcaggccagactgagtgaatcagattatgaaaagctgaatgtctccaaggccttggaggccgcactggtggagaaaggtgagttcgcattgaggctgagctcaacacaggaggaagtgcatcagctgagaagaggcatcgagaaactgagagttcgcattgaggccgatgaaaagaagcagctgcacatcgcagagaaactgaaagaacgcgagcgggagaatgattcacttaaggataaagttgagaaccttgaaagggaattgcagatgtcagaagaaaaccaggagctagtgattcttgatgccgagaattccaaagcagaagtagagactctaaaaacacaaatagaagagatggccagaagcctgaaagtttttgaattagaccttgtcacgttaaggtctgaaaaagaaaatctgacaaaacaaatacaagaaaaacaaggtcagttgtcagaactagacaagttactctcttcatttaaaagtctgttagaagaaaaggagcaagcagagatacagatcaaagaagaatctaaaactgcagtggagatgcttcagaatcagttaaaggagctaaatgaggcagtagcagccttgtgtggtgaccaagaaattatgaaggccacagaacagagtctagacccaccaatagaggaagagcatcagctgagaaatagcattgaaaagctgagagcccgcctagaagctgatgaaaagaagcagctctgtgtcttacaacaactgaaggaaagtgagcatcatgcagatttacttaagggtagagtggagaaccttgaaagagagctagagatagccaggacaaaccaagagcatgcagctcttgaggcagagaattccaaaggagaggtagagaccctaaaagcaaaaatagaagggatgacccaaagtctgagaggtctggaattagatgttgttactataaggtcagaaaaagaaaatctgacaaatgaattacaaaaagagcaagagcgaatatctgaattagaaataataaattcatcatttgaaaatattttgcaagaaaaagagcaagagaaagtacagatgaaagaaaaatcaagcactgccatggagatgcttcaaacacaattaaaagagctcaatgagagagtggcagccctgcataatgaccaagaagcctgtaaggccaaagagcagaatcttagtagtcaagtagagtgtcttgaacttgagaaggctcagttgctacaaggccttgatgaggccaaaaataattatattgttttgcaatcttcagtgaatggcctcattcaagaagtagaagatggcaagcagaaactggagaagaaggatgaagaaatcagtagactgaaaaatcaaattcaagaccaagagcagcttgtctctaaactgtcccaggtggaaggagagcaccaactttggaaggagcaaaacttagaactgagaaatctgacagtggaattggagcagaagatccaagtgctacaatccaaaaatgcctctttgcaggacacattagaagtgctgcagagttcttacaagaatctagagaatgagcttgaattgacaaaaatggacaaaatgtcctttgttgaaaaagtaaacaaaatgactgcaaaggaaactgagctgcagagggaaatgcatgagatggcacagaaaacagcagagctgcaagaagaactcagtggagagaaaaataggctagctggagagttgcagttactgttggaagaaataaagagcagcaaagatcaattgaaggagctcacactagaaaatagtgaattgaagaagagcctagattgcatgcacaaagaccaggtggaaaaggaagggaaagtgagagaggaaatagctgaatatcagctacggcttcatgaagctgaaaagaaacaccaggctttgcttttggacacaaacaaacagtatgaagtagaaatccagacataccgagagaaattgacttctaaagaagaatgtctcagttcacagaagctggagatagaccttttaaagtctagtaaagaagagctcaataattcattgaaagctactactcagattttggaagaattgaagaaaaccaagatggacaatctaaaatatgtaaatcagttgaagaaggaaaatgaacgtgcccaggggaaaatgaagttgttgatcaaatcctgtaaacagctggaagaggaaaaggagatactgcagaaagaactctctcaacttcaagctgcacaggagaagcagaaaacaggtactgttatggataccaaggtcgatgaattaacaactgagatcaaagaactgaaagaaactcttgaagaaaaaaccaaggaggcagatgaatacttggataagtactgttccttgcttataagccatgaaaagttagagaaagctaaagagatgttagagacacaagtggcccatctgtgttcacagcaatctaaacaagattcccgagggtctcctttgctaggtccagttgttccaggaccatctccaatcccttctgttactgaaaagaggttatcatctggccaaaataaagcttcaggcaagaggcaaagatccagtggaatatgggagaatggtggaggaccaacacctgctaccccagagagcttttctaaaaaaagcaagaaagcagtcatgagtggtattcaccctgcagaagacacggaaggtactgagtttgagccagagggacttccagaagttgtaaagaaagggtttgctgacatcccgacaggaaagactagcccatatatcctgcgaagaacaaccatggcaactcggaccagcccccgcctggctgcacagaagttagcgctatccccactgagtctcggcaaagaaaatcttgcagagtcctccaaaccaacagctggtggcagcagatcacaaaaggtcaaagttgctcagcggagcccagtagattcaggcaccatcctccgagaacccaccacgaaatccgtcccagtcaataatcttcctgagagaagtccgactgacagccccagagagggcctgagggtcaagcgaggccgacttgtccccagccccaaagctggactggagtccaagggcagtgagaactgtaaggtccagtgaaggcactttgtgtgtcagtacccctgggaggtgccagtcattgaatagataaggctgtgcctacaggacttctctttagtcagggcatgctttattagtgaggagaaaacaattccttagaagtcttaaatatattgtactctttagatctcccatgtgtaggtattgaaaaagtttggaagcactgatcacctgttagcattgccattcctctactgcaatgtaaatagtataaagctatgtatataaagctttttggtaatatgttacaattaaaatgacaagcactatatcacaatctctgtttgtatgtgggttttacactaaaaaaatgcaaaacacattttattcttctaattaacagctcctaggaaaatgtagacttttgctttatgatattctatctgtagtatgaggcatggaatagttttgtatcgggaatttctcagagctgagtaaaatgaaggaaaagcatgttatgtgtttttaaggaaaatgtgcacacatatacatgtaggagtgtttatctttctcttacaatctgttttagacatctttgcttatgaaacctgtacatatgtgtgtgtgggtatgtgtttatttccagtgagggctgcaggcttcctagaggtgtgctataccatgcgtctgtcgttgtgcttttttctgtttttagaccaattttttacagttctttggtaagcattgtcgtatctggtgatggattaacatatagcctttgttttctaataaaatagtcgccttcgttttctgtaaaaaaaaaaaaaaaaaaaaaa

SEQ ID NO: 187 - DNA, 2448 bp, Homo sapiens
gggttggttccaagtctttgctattgtgaatagtgccgcaataaacatacgtgtgcatgtgtctttatagcagcatgatttatagtcctttgggtatatacccagtaatgggatggctgggttctagatccctgaggaatcgccacattgacttgcacaatggttgaactagtttacagtcccaccaacagtgtaaaagtgttcctatttctccacatcctctccggcacctgttgtttcctgactttttaatgattgccattctaactggtgtgagatgatatctcattgtggttttgatttgcatttctctgatggccagtgatggtgagcattttttcatgtgttttttggctgcataaatgtcttcttttgagaagtgtctgttcatgatttttttttttagacaaagtattagatcagatatttttggggaaaaatgctttgtgattgcttgttttgaatggtgagcattgtattttgttttaagttgttttctggttgttattacagctatgaagtcttacactccatatttcattctcctgtggagtgctgttgggatagcgaaggctgccaaaatcatcatcgtgccgccaattatgtttgaaagccatatgtacattttcaagacgctagcctcagccttgcacgagagaggccaccatacagtgttcctcctctctgaaggcagagacatcgccccatctaatcattacagcctccagcgctacccagggatctttaacagtaccacctcagatgctttcctacagtccaagatgcggaatattttctctgggagattgacagcaatcgaactgtttgacatactggatcactatactaagaactgtgacctgatggttggcaaccatgccctgatccagggtctgaagaaagaaaaatttgacctgctgctggtggaccctaatgatatgtgtggatttgtgatagctcatcttttaggggttaaatatgctgtattttcaactggcctttggtatcctgctgaagtgggtgctcctgctccattagcatacgtcccagagtttaactcactcctcacagaccgcatgaacttgctgcaaaggatgaaaaataccggtgtttacctcatttccagattaggggtcagctttctggttcttcccaaatatgaaaggataatgcagaagtacaacctgctgccggagaagtccatgtatgatttggttcatgggtccagcctgtggatgctgtgtactgacgtagcactggaattcccaagacccactctgcctaatgttgtttatgtaggaggaatcctaaccaaaccagccagcccactaccagaagatctccaaagatgggtaaatggtgctaatgaacatggctttgtcttggtgtcttttggagctggtgtcaagtatctgtcagaagacattgctaacaaactggcaggagctctggggagattgcctcaaaaagtgatttggaggttttctggacccaaaccaaagaatctaggaaacaacactaaactcatagaatggttaccacaaaatgacctgcttgggcattcaaagattaaagccttcctgagccatggtggtttgaacagtatttttgaaactatgtatcatggtgtgcctgtagtgggaattccactctttggagaccattatgatactatgaccagagtacaggcaaaaggcatggggatattgctagaatggaagacagttactgaaaaagagctctatgaagcactagtgaaggttatcaataatcccagctaccgtcagagggctcagaagctttcggaaattcacaaggatcaacctggtcaccctgtcaatcgaactatctattggatagattatattattcgtcacaatggagcccatcacctacgtgccgctgtccatcagatctccttttgtcagtattttttactggatattgcctttgtgcttttgcttggtgctgccttgttatactttctcttgtcttgggtgacaaaatttatctacagaaaaatcaaaagtctgtggtctagaaataagcatagcacagttaatggacattaccacaatggaatcctcaatggcaagtacaaaagaaatggccatattaaacatgaaaagaaagtgaaatgagccaacagcccaggtgatagaaataaattggttcactcattgaatttttattgctattatttagtctaacagctactaaaagtaaaacatcagtaaacaattctaacatgcccttatgagactactaatgaaattctgtggaattaagatggctgtaaaaagcacaaacctaaaatgcagaaatgtattttattcaaatactgatgtagagagttttggcactgaaccttttagaagccttaattatttaaatcaattcagtgactgtgtcagaccttagttttaaatcttgatatgtgcgtgtccc

SEQ ID NO: 188 - DNA, 2114 bp, Homo sapiens
aggaattccggtggccggccactcccgtctgctgtgacgcgcggacagagagctaccggtggacccacggtgcctccctccctgggatctacacagaccatggccttgcaacggctcgacccctgttggtcctgtggggaccgccctggcagcctcctgttcctgctcttcagcctcggatgggtgcatcccgcgaggaccctggctggagagacagggacggagtctgcccccctggggggagtcctgacaaccccccataacatttccagcctctcccctcgccaactccttggcttcccgtgtgcggaggtgtccggcctgagcacggagcgtgtccgggagctggctgtggccttggcacagaagaatgtcaagctctcaacagagcagctgcgctgtctggctcaccggctctctgagccccccgaggacctggacgccctcccattggacctgctgctattcctcaacccagatgcgttctcggggccccaggcctgcacccgtttcttctcccgcatcacgaaggccaatgtggacctgctcccgaggggggctcccgagcgacagcggctgctgcctgcggctctggcctgctggggtgtgcgggggtctctgctgagcgaggctgatgtgcgggctctgggaggcctggcttgcgacctgcctgggcgctttgtggccgagtcggccgaagtgctgctaccccggctggtgagctgcccgggacccctggaccaggaccagcaggaggcagccagggcggctctgcagggcgggggacccccctacggccccccgtcgacatggtctgtctccacgatggacgctctgcggggcctgctgcccgtgctgggccagcccatcatccgcagcatcccgcagggcatcgtggccgcgtggcggcaacgctcctctcgggacccatcctggcggcagcctgaacggaccatcctccggccgcggttccggcgggaagtggagaagacagcctgtccttcaggcaagaaggcccgcgagatagacgagagcctcatcttctacaagaagtgggagctggaagcctgcgtggatgcggccctgctggccacccagatggaccgcgtgaacgccatccccttcacctacgagcagctggacgtcctaaagcataaactggatgagctctacccacaaggttaccccgagtctgtgatccagcacctgggctacctcttcctcaagatgagccctgaggacattcgcaagtggaatgtgacgtccctggagaccctgaaggctttgcttgaagtcgacaaagggcacgaaatgagtcctcaggctcctcggcggcccctcccacaggtggccaccctgatcgaccgctttgtgaagggaaggggccagctagacaaagacaccctagacaccctgaccgccttctaccctgggtacctgtgctccctcagccccgaggagctgagctccgtgccccccagcagcatctgggcggtcaggccccaggacctggacacgtgtgacccaaggcagctggacgtcctctatcccaaggcccgccttgctttccagaacatgaacgggtccgaatacttcgtgaagatccagtccttcctgggtggggcccccacggaggatttgaaggcgctcagtcagcagaatgtgagcatggacttggccacgttcatgaagctgcggacggatgcggtgctgccgttgactgtggctgaggtgcagaaacttctgggaccccacgtggagggcctgaaggcggaggagcggcaccgcccggtgcgggactggatcctacggcagcggcaggacgacctggacacgctggggctggggctacagggcggcatccccaacggctacctggtcctagacctcagcgtgcaagagaccctctcggggacgccctgcctcctaggacctggacctgttctcaccgtcctggcactgctcctagcctccaccctggcctgagggccccactcccttgctggccccagccctgctggggatccccgcctggccaggagcaggcacgggtgatccccgttccaccccaagagaactcgcgctcagtaaacgggaacatgccccctgcagac

SEQ ID NO: 189 - DNA, 1383 bp, Homo sapiens
ggagcgagctggcggcgccgtcgggcgccgggccgggccatggagctgtggccgtgtctggccgcggcgctgctgttgctgctgctgctggtgcagctgagccgcgcggccgagttctacgccaaggtcgccctgtactgcgcgctgtgcttcacggtgtccgccgtggcctcgctcgtctgcctgctgtgccacggcggccggacggtggagaacatgagcatcatcggctggttcgtgcgaagcttcaagtacttttacgggctccgcttcgaggtgcgggacccgcgcaggctgcaggaggcccgtccctgtgtcatcgtctccaaccaccagagcatcctggacatgatgggcctcatggaggtccttccggagcgctgcgtgcagatcgccaagcgggagctgctcttcctggggcccgtgggcctcatcatgtacctcgggggcgtcttcttcatcaaccggcagcgctctagcactgccatgacagtgatggccgacctgggcgagcgcatggtcagggagaacctcaaagtgtggatctatcccgagggtactcgcaacgacaatggggacctgctgccttttaagaagggcgccttctacctggcagtccaggcacaggtgcccatcgtccccgtggtgtactcttccttctcctccttctacaacaccaagaagaagttcttcacttcaggaacagtcacagtgcaggtgctggaagccatccccaccagcggcctcactgcggcggacgtccctgcgctcgtggacacctgccaccgggccatgaggaccaccttcctccacatctccaagaccccccaggagaacggggccactgcggggtctggcgtgcagccggcccagtagcccagaccacggcagggcatgacctggggagggcaggtggaagccgatggctggaggatgggcagaggggactcctcccggcttccaaataccactctgtccggctcccccagctctcactcagcccgggaagcaggaagccccttctgtcactggtctcagacacaggcccctggtgtcccctgcagggggctcagctggaccctccccgggctcgagggcagggactcgcgcccacggcacctctgggagctgggatgataaagatgaggcttgcggctgtggcccgctggtgggctgagccacaaggcccccgatggcccaggagcagatgggaggaccccgaggccaggagtcccagactcacgcaccctgggccacagggagccgggaatcggggcctgctgctcctgctggcctgaagaatctgtggggtcagcactgtactccgttgctgtttttttataaacacactcttggaaaaaaaaaaaaaaaaaaaaaaaaaaa

SEQ ID NO: 190 - DNA, 1977 bp, Homo sapiens
  misc_feature (1)...(1977): n=a,t,g or c
ttgcaccaggcactgctgcacaacaagatacgctcgccacagtccttctttgacaccacaccatcaggccgcatcctgaactgcttctccaaggacatctatgtcgccttgatgaggttctggcccctgtcaccntcancgccgctcaattacttcttcaacgccatctccactcttgtggtcatcatggccagcacgacggatcttnacttgtgggtnanntgcccctgggtngtgctcttacaccttagtgcagcgcttctatgcagccacatcacggcaactgaagcggctggaatcagtcagccgtcacctatctactcccacttttcggagacagtgactggtgccagtgtcatccgggcctacaaccgcagccgggattttgagatcatcagtgatactaaggtggatgccaaccagagaagctgctacccctacatcatctccaaccggtggctgagcatcggagtggagttcgtggggaactgcgtggtgctctttgctgcactatttgccgtcatcgggaggagcagcctgaacccggggctggtgggctttctgtgtcctactccttgcaggtgacatttgctctgaactggatgatacgaatgatgtcagatttggaatctaacatcgtggctgtggagagggtcaaggagtactccaagacagagacagaggcgccctgggtggtggaacagccgccctcccgaaggttggccccacgtggggaggtggagttccggaattattctgtgcgctaccggccgggcctagacctggtgctgagagacctgagtctgcatgtgcacggtggcgagaaggtggggatcgtgggccgcactggggctggcaagtcttccatgaccctttgcctgttccgcatcctggaggcggcaaagggtgaaatccgcattgatggcctcaatgtggcagacatcggcctccatgacctgcgctctcagctgaccatcatcccgcaggaccccatcctgttctcggggaccctgcgcatgaacctggaccccttcggcagctactcagaggaggacatttggtgggctttggagctgtcccacctgcacacgtttgtgagctcccagccggcagctgggagcttccagtgctcagagggcggggagaatctcagcgtggnccagaggagctcgtgtgccatggcccgagccctgctccgcaagagccgcatcctggttttagacgaggccacagctgccatcgacctggagactgacaacctcatccaggctaccatccgcacccagtttgatacctgcactgtcctgaccatcgcacaccggcttaacactagcatggactacaccagggtcctggtcctggacaaaggagtagtagctgagtttgattctccagccaacctcattgcagctagaggcatcttctacgggatggccagagatgctggacttgcctaaaatatatctgagatttcctcctggcctttcctggttttcatcaggaaggaaatgacaccaaatatgtccgcagaatggacttgatagcaaacactgggggcaccttaagatttttgcacctgtaaagtgccttacagggtaactgtgctgaatgctttagatgaggaaaagatccccaagtggtgaatgacacgcctaaggtcacagctagtttgagccagttagactagtcccgggtctcccgaatcccaactgagtgttatttgcacactgcactgttttcaaataacgattttatgaaatgacctctgtcctccctctgatttttcatattttctaaagtttcgtttctgttttttaataaaaagctttttccccctggaacagaagacagctgctgggtcaggccacccctaggaactcagtcctgtactctggggtgctgcctgaatccattaaaaatgggagtactgatgaaataaaactacatggtcaacagtaaaaaaaaaaaaaaaaaaaa

SEQ ID NO: 191 - DNA, 2814 bp, Homo sapiens
gacaggccggggttactgtggcgaccacgagagcagctttggcgctatggaggagcccggggctacccctcaaccgtatttggggctgctcctggaggagctacgcagggttgtggcagcactgcctgaaggtatgagaccagattctaatctttatggttttccatgggaattggtgatatgtgcagctgttgttggattttttgctgttctcttttttttgtggagaagttttagatcggttaggagtcggctttatgtgggacgagagaaaaagcttgctctaatgctttctggactaattgaagaaaaaagtaaactacttgaaaaatttagccttgttcaaaaagagtatgaaggctatgaagtagagtcatctttaaaggatgccagctttgagaaggaggcaacagaagcacaaagtttggaggcaacctgtgaaaagctgaacaggtccaattctgaacttgaggatgaaatactctgtctagaaaaagagttaaaagaagagaaatccaaacattctgaacaagatgaattgatggcggatatttcaaaaaggatacagtctctagaagatgagtcaaaatccctcaaatcacaagtagctgaagccaaaatgaccttccagatatttcaaatgaatgaagaacgactgaagatagcaataaaagatgctttgaatgaaaattctcaacttcaggaaagccagaaacagcttttgcaagaagctgaagtatggaaagaacaagtgagtgaacttaataaacagaaagtaacatttgaagactccaaagtacatgcagaacaagttctaaatgataaagaaagtcacatcaagactctgactgaacgcttgttaaagatgaaagattgggctgctatgcttggagaagacataacggatgatgataacttggaattagaaatgaacagtgaatcggaaaatggtgcttacttagataatcctccaaaaggagctttgaagaaactgattcatgctgctaagttaaatgcttctttaaaaaccttagaaggagaaagaaaccaaatttatattcagttgtctgaagttgataaaacaaaggaagagcttacagagcatattaaaaatcttcagactcaacaagcatctttgcagtcagaaaacacacattttgaaaatgagaatcagaagcttcaacagaaacttaaagtaatgactgaattatatcaagaaaatgaaatgaaactccacaggaaattaacagtagaggaaaattatcggttagagaaagaagagaaactttctaaagtagatgaaaagatcagccatgccactgaagagctggagacctatagaaagcgagccaaagatcttgaagaagaattggagagaactattcattcttatcaagggcagattatttcccatgagaaaaaagcacatgataattggttggcagctcggaatgctgaaagaaacctcaatgatttaaggaaagaaaatgctcacaacagacaaaaattaactgaaacagagcttaaatttgaacttttagaaaaagatccttatgcactcgatgttccaaatacagcatttggcagaggctcacgaggcccagggaatcctctggaccatcagattaccaatgaaagaggagaatcaagctgtgataggttaaccgatcctcatagggctccctctgacactgggtctctgtcacctccatgggaccaggaccgtaggatgatgtttcctccgccaggacaatcatatcctgattcagcccttcctccacaaaggcaagacagattttgttctaattctggtagactgtctggaccagcagaactcagaagttttaatatgccttctttggataaaatggatgggtcaatgccttcagaaatggaatccagtagaaatgataccaaagatgatcttggtaatttaaatgtgcctgattcatctctccctgctgaaaatgaagccactggccctggctttgttcctccacctcttgctccaatcagaggtccattgtttccagtggatgcaagaggcccattcttgagaagaggacctcctttccccccacctcctccaggagccatgtttggagcttctcgagattattttccaccaagggatttcccaggtccaccacctgctccatttgcaatgagaaatgtctatccaccgaggggttttcctccttaccttcccccaagacctggatttttccccccacccccacattctgaaggtagaagtgagttcccctcaggtttgattccaccttcaaatgagcctgctactgaacatccagaaccacagcaagaaacctgacaatatttttgctctcttcaaaagtaattttgactgatctcattttcagtttaagtaactgctgttacttaagtgattacacttttgctcaaattgaagcttaatggaattataattctcaggatagtattttgtaaataaagatgatttaaatatgaatcttatgagtaaattatttcaattttattttagacggtataactatttcaatttgattaatccactattatataaacaatagtgggagttttatatatgtaatctttcaggtggggaggctttaaattctgaagtctgtgtctttatgccaagaactgtatttactgtggttgtggacaaatgtgaaagtaactttatgcttaaataaattatagttgatttaaagatttgtttggcattgataataataaaatcagtagtttttctataaaaaaaaaaaaaaaaaaaaaaaaaaaaaaaaaaaaaaaaaaaaaaaaaaaaaa

SEQ ID NO: 192 - DNA, 1915 bp, Homo sapiens
ttagagccgggtaggggagcgcagcggccagatacctcagcgctacctggcggaactggatttctctcccgcctgccggcctgcctgccacagccggactccgccactccggtagcctcatggctgcaacctgtgagattagcaacatttttagcaactacttcagtgcgatgtacagctcggaggactccaccctggcctctgttccccctgctgccacctttggggccgatgacttggtactgaccctgagcaacccccagatgtcattggagggtacagagaaggccagctggttgggggaacagccccagttctggtcgaagacgcaggttctggactggatcagctaccaagtggagaagaacaagtacgacgcaagcgccattgacttctcacgatgtgacatggatggcgccaccctctgcaattgtgcccttgaggagctgcgtctggtctttgggcctctgggggaccaactccatgcccagctgcgagacctcacttccagctcttctgatgagctcagttggatcattgagctgctggagaaggatggcatggccttccaggaggccctagacccagggccctttgaccagggcagcccctttgcccaggagctgctggacgacggtcagcaagccagcccctaccaccccggcagctgtggcgcaggagccccctcccctggcagctctgacgtctccaccgcagggactggtgcttctcggagctcccactcctcagactccggtggaagtgacgtggacctggatcccactgatggcaagctcttccccagcgatggttttcgtgactgcaagaagggggatcccaagcacgggaagcggaaacgaggccggccccgaaagctgagcaaagagtactgggactgtctcgagggcaagaagagcaagcacgcgcccagaggcacccacctgtgggagttcatccgggacatcctcatccacccggagctcaacgagggcctcatgaagtgggagaatcggcatgaaggcgtcttcaagttcctgcgctccgaggctgtggcccaactatggggccaaaagaaaaagaacagcaacatgacctacgagaagctgagccgggccatgaggtactactacaaacgggagatcctggaacgggtggatggccggcgactcgtctacaagtttggcaaaaactcaagcggctggaaggaggaagaggttctccagagtcggaactgagggttggaactatacccgggaccaaactcacggaccactcgaggcctgcaaaccttcctgggaggacaggcaggccagatggcccctccactggggaatgctcccagctgtgctgtggagagaagctgatgttttggtgtattgtcagccatcgtcctgggactcggagactatggcctcgcctccccaccctcctcttggaattacaagccctggggtttgaagctgactttatagctgcaagtgtatctccttttatctggtgcctcctcaaacccagtctcagacactaaatgcagacaacaccttcctcctgcagacacctggactgagccaaggaggcctggggaggccctaggggagcaccgtgatggagaggacagagcaggggctccagcaccttctttctggactggcgttcacctccctgctcagtgcttgggctccacgggcaggggtcagagcactccctaatttatgtgctatataaatatgtcagatgtacatagagatctattttttctaaaacattcccctccccactcctctcccacagagtgctggactgttccaggccctccagtgggctgatgctgggacccttaggatggggctcccagctcctttctcctgtgaatggaggcagagacctccaataaagtgccttctgggctttttct

SEQ ID NO: 193 - DNA, 1195 bp, Homo sapiens
cacgaggcggattcttggcgccggagaagaggcagggtcaccctctctccacgtcagagacctgactgtggagatggcggctcagaagataaacgaggggctggaacacctcgccaaagcagagaaatacctgaaaactggttttttaaaatggaagccagattatgacagtgccgcttctgaatatggaaaagcagctgttgcttttaaaaatgccaaacagtttgagcaagcaaaagatgcctgcctgagggaagctgttgcccatgaaaataatagggctctttttcatgctgccaaagcttatgagcaagctggaatgatgttgaaggagatgcagaaactaccagaggccgttcagctaattgagaaggccagcatgatgtatctagaaaacggcaccccagacacagcagccatggctttggagcgagctggaaagcttatagaaaatgttgatccagagaaggctgtacagttatatcaacagacagctaatgtgtttgaaaatgaagaacgcttacgacaggcagttgaattactaggaaaagcctccagactactagtacgaggacgtaggtttgatgaggcggcactctctattcagaaagaaaaaaatatttataaggaaattgagaattatccaacttgttataagaaaacaattgctcaagtcttagttcatctacacagaaatgactatgtagctgcagaaagatgtgtccgggagagctatagcatccctgggttcaatggcagtgaagactgtgctgccctggaacagcttcttgaaggttatgaccagcaagaccaagatcaggtgtcagatgtctgcaactcaccgcttttcaagtacatggacaatgattatgctaagctgggcctgagtttggtggttccaggagggggaatcaagaagaaatcacctgcaacaccacaggccaagcctgatggtgtcactgccacggctgctgatgaagaggaagatgaatactcaggaggactatgctagtattttgcttgctgaaaagaaaagggaaacaaaggtaaaatcctgacatgccatttcaaggacttgggaatagattagggatatccgtacttcattacagtcatgattttggatcctaataaagactagtttttagttaccatcttcccaaatcaaaaaaaaaaaaaaaaaaaaaaaaaaaaa

SEQ ID NO: 194 - DNA, 2302 bp, Homo sapiens
gttcctcgtgccaacgtgtcttgtaaggtgcggctagaaactggggacatggcagcgcctggcccagcgctctgcctcttcgacgtggatgggaccctcaccgccccgcggcagaaaattaccaaagaaatggatgacttcctacaaaaattgaggcagaagatcaaaatcggagtggtaggcggatcggactttgagaaagtgcaggagcaactgggaaatgatgtggttgaaaaatacgattatgtgtttccagaaaatggcttggtagcatacaaagatgggaaactcttgtgtagacagaatattcaaagtcatctgggtgaggccctaatccaagatttaatcaactactgtctgagctacattgcgaaaattaaactcccgaagaagaggggtactttcattgaattccgaaatgggatgttaaacgtgtcccctattggaagaagctgcagccaagaagaacgcattgagttctacgaactcgataaaaaagaaaatataagacaaaagtttgtagcagatctacggaaagagtttgctggaaaaggcctcacgttttccataggaggccagatcagctttgatgtctttcctgatggatgggacaagagatactgtctgcgacatgtggaaaatgacggttataagaccatttatttctttggagacaaaactatgccaggtggcaatgaccatgagatcttcacagaccccagaaccatgggctactccgtgacagcgcctgaggacacgcgcaggatctgtgaactgctgttctcctaacgtgggagcgggaggggcggggtcccggctgacaagcagcatagggcattcggtggccagagccgagggtcctcccacacgtgctcacccacccgcagcctaggcaggctctgcatgctatgccaggcatgtgccgtctggacttccacctccagtgccagaaacttccagaaagaaggagaaactcttgtcaagaatggcccagaggaatgcctcgcacaaaaggtcttccccacccacccccagccccctagtctaatacccaccctgatacgtgcaatcatgtagttttggcggaaatttccccatcattctaggatgatacagaaagaaaactgtgcctggaccctccctcttggtgggtctgtggaaacataagcggtttttttaatgggcccctgcatcaataccaaacatgggggtttggtaatgagaaaccaggacaggccatctgcagtgacccagcccaggacgaagtttacaaacacctcctggaacgaagctcccgcctgcatgtcaccttgatgggggctgtgagtggggcagtgtgatacccagtgactagacgcactctgcgttttcccgtgtttggggctgaggcctgctggacagatggctggccaagtgggagcagaccctagggagtttgcacctcggctgggccggattcggaccggctctgtgttcactacactcagaatagcctgctgcttctctgtctccgagaccggagtacttgggaacaacagctgggctggagagttggtgctggcaaaacagtccttcccctggggccggttcttacccaggtccagagaaaccaacgcgggatgtcagacttcaccaaaaggactttctggttgcccctggctggcttcctggaggcgttcgcctctagtttctcagggatggagcgagagcccagccagagaacagtaagaggagctgctctcctatctgcactcacccaggccttcacccagactttaccgcggaggcggctgagtgcagctacagctaggtccgcgtccctcactcttttcatcttctgcacgttcttcgtgaaactggaaggatcccgggtctcagctagaacacggtggaagagaactttcctaggaaacggttcatgtgtcacttttcaggatgtggaaacactgagccatacaccctccattgcttggtgctggggttgtgtggcctccactgggcacttgccgacctgagtctggggccaggggagcccaggctgccctgcactcctgcctcccagcccacagccaggtgctttcatcacagctaaacctggttccctccaaacctcccagccactcgggcttgtaactgtctgagccccggatccggtggggtgaaagcagccagctcatcccagtgactcacaggacacagccatccagcggcatctttccttgtcgaatgatactgtaatgaccttccaaagtgaagagtagcacattaaagtgattttattgtttaaaaaaaaaaaaaaaaa

SEQ ID NO: 195 - DNA, 1952 bp, Homo sapiens
gtggaagagacctacttgcacattcttaacctgtatttgaacacaaaatatctatacttcatgctccagcccaagcctataccctgtaatagcatactattattgaaatcgcttgaccggtcttgttcacataggcctctgggagtgatttggttctttgccctaatgtttcatttgacggtctctttttgatcaaccaatttttctaaaagttcagtcgaaagcttttaagtatagcttcctcccttgaaaaaaaatgtaaactatgactgctgagtgataaaacactgtggtgtgaaagtgtcatcttcactgccaatcaggcaaagaccggaaagatttgcattttattatgtctgtcttatcatgcaatggaaatgatgctttttgtaagtatgcatcttaccaatgatgtaatggtttaatacctttgaatgttttaataaccaagttgctgctgaacttatactaaatcaggggaccaaaaaacttgctcttatcttctcaaattgtattctatatccattaatgtatcagttatcccaaagccttcaggtggaggggtttaccaccttcctaggtcgttcaaccaggttttgtgaggaatgcattcaaagtggctttataaaagaagattttctttagcaagaataatgaggtcatgtcatttgttaataagtatctgtgataaatccgtggttcaaggttaagccattctggtattctggtattagcaactgtaaattctgccacctcatacatggaacagagcttgtgggatgctaatagttagtgaagtatacatgatttaatttctaataatctttatgttttctttaaggatggtggtgtattgctctttttcagctttatttttaagagtacagtcaggaaaccaacaaggggcctaagagtggctgcccctgcttgggacattacagcaagtgaaacaaagttaatgtgacaagctttgctttgttatcattggtcttcactagaggataccttttacatgtacttctctcttggatcaaatatgtctttaactgtacatctcagtggctggaggccatgccttttaagcatgtgtaaaatttttaaagaaatgaacatacacatagttattttagtaatatttcctgaaagaaaaaccaaattctgctataagtcttgatcttcaatgaacttttaaataatgcatttagctggaaaacaagactttctcagcttgtattacctagaagcgtgaatgtataggatacctgactactaagactatattctcagccctgccctgtcttttatttgcgggtctaatctaatattagaatatattaaccgcttaaggcattgaagccatatgggatggggaatgcatttcttcagtgtttctccgagagactttccatttccttggagttatggcggcaagtaagtatcatagtattaagaaatttgcctaaatctgagttgtgcctttctttactcacaaggcatgggctttgtcctggtgatcagtttgtaagccttcttccttcccagctccttaataaaagcaaagtgattgagtaggtaatgttcaaagtgtctgcctgtgtacatgtacttgtattgattatgtagttcagtaagatgtgcccaagtcatttcagaaagaaagacccttcagttttgatgcattttgctgaacacttgggtagtgagtgggatcctatccagttgaggaatgcttgcaatgctcattgaagggatttgctttgggactttgtcatcttccagaaaggaaacatattgtatatttggcccagtgtgattgattgctttatctttggtaacttttacttgaatgggatttgctgaattaatgactattgaatttaaaactaattatgagttgacaaataaataaaaggtagtgtttatgtctgaaaaaaaaaaaaaaaaaaaaaaaa

SEQ ID NO: 196 - DNA, 401 bp, Homo sapiens
  misc_feature (1)...(401): n=a,t,g or c
tgcctaacttaaaaattgccatgtgtcaaaatcatggttttgtaattgctaaggcatgatatgtcaggttatttgaatataattactttttgaagtaattgtgaccacaaaacatcttttttacatgaaggagctgtgtatcatttgaaattactcaaatgatgtcttgctctgaggcataaatcccaggtacttagtgtttttaataatatggtgccactgcaggatttgggggcggtggggaagaacaagcataatggtagggggaggcttggctgaaactaaccactgagtgaattgcactgcaggttttacttaacgggaattccttatttgggatgtcaagagggcagctgcaaactgaaaaacaancagtaaatgtctttgttttatgtattgta

SEQ ID NO: 197 - DNA, 376 bp, Homo sapiens
  misc_feature (1)...(376): n=a,t,g or c
agctcatcagctatcgttagtgtattttatgtggcccaagaaaattcttcttcaaatgtggcccagggaagccaaaagtttggacacctgtgatttacaggttatgcctagatctgaaacagatccccatccctcctaaagctcgcccactggttatgggccctgtttctcttagaaacaccacacacatcatttgggaaaagcacactgagtagaaacatggcctgaaagggtggtgggcggtggacctggcttcctgtggccagaggtcagcggacgatagaaatggtctgatcggccacagcaaagacttgggaagattgggccccgggaaggacacattgattgggcacagagcactgtgccggacgngggc

SEQ ID NO: 198 - DNA, 476 bp, Homo sapiens
  misc_feature (1)...(476): n=a,t,g or c
ttttttttttgcaggtgactgaaactttaatgcacctagggattgaccacaacatttacaaatcagtgttactgcattggtttttcaaagattagctacatttataaactttattttaaaagtttcacaaagttaaatttccttaacacttcaacaggaatctaactctttacagtctatcaaaatggtaatattttaccttttttttttttttttttttttttttaaagcactggngctcttcttaagtgaaatgttaacacagggctcaatacataaaagagaaagtgaagttgttccatttggggggtcccataaggggcctcatgtttccctaggngttaccccttcagacacagcacagcctacaaagccatggaattaaaatattaacaatgaatgcataaagatttcactgacaaataaaaaccagggagtgcattcagtgaccacaactttctaagcttctgcttttc

SEQ ID NO: 199 - DNA, 380 bp, Homo sapiens
cggtttgcataaagcatttatttacagcagtacttgcaacaaagtaagtgctatataagtatgagccatttttattaccataagcaaagctttctacattggttgacttgacaaacttctggcaaactttttttctctttggaaatcattcagcaggcactgtttacatcctttcgctgccatatctctagctttcactaaatctgccacacattcctgccttctctgttgacctcgcttggattctcctacatgcttccagttaagccagccagaggattttcctgtctctgggaatcttgtggaaaatcttgcattttggggcaccttctccttcagttataatgatataccttaaaagttttacatttacaaatgtc

SEQ ID NO: 200 - DNA, 480 bp, Homo sapiens
  misc_feature (1)...(480): n=a,t,g or c
gggaagtttactgggccatcacagacttttgttctagtgattgtatgtattaggagtcatagcatgccctacggagatctggattcttatacactaagatgtgtcttaagaatcacagtgcgtgcttcatccctttattgaagaacagaaaattatgactactctacaaggtggataatattttggtacctgtggctggccacagccctgttcctcaaagctgaattgatagatttctctttgacttccaagacctagcagttataaggcaccttgaaataaattgtttgtgcctggaaatgcagggagggcaatagctttgtaaattggnttacatttttctccttgaatttttctagggtcctagtgcttccgaatcatttaatggcattgtcggatatccttttacatttcaattgcaatccatgaaattacatttagaagattcttagtacttaacggtagtcttcccatgaattt

SEQ ID NO: 201 - DNA, 406 bp, Homo sapiens
caatttagtcactatttattatattgacatatttacaaaataatacaaagtgaaataccactctaattcaccatattacacaagggctgcatacaggcaagacaaagtatatggaaaacatttacttctgtctttggtattagaactctacacaaatctgcagcatttaaattttccaaaacaaagtattaaacgtggacaaagatgtaattggtaatgtcacaaaaaggggctccaatatcctctgctaggaaacccccaggcccatgaaatgcaacaggaagactaaacaccatttataaggagagggtctattgactaaaataaacaatacatgctacaataccatccacaggagtgtttctgcttgtgtgaggctgctccctccataacaaagttcggctga

SEQ ID NO: 202 - DNA, 449 bp, Homo sapiens
  misc_feature (1)...(449): n=a,t,g or c
tttttttttttttcaaaaaagtaggcaagtactttgctttattgacatcaaatggaacttcttgtccctcacgcagtccacacaacagtaaaggcacaatgaggcatattaaaacatagccagtttcaacagcttggatatttcctgccatggaaaagtatcctgcccacagattcacattaacatacatggtacattaatatcaatctctatcatataccaggccacggtacatgtttgcacgcagggtcacgttctgcaacaaacttattctaataacagtattcagaaggcaccctatgggacacaggtgacagttgaagttacgaggctagatgggccacatcttttacatccaagaaccgccctggggncacaccccaaactggctngaggtgcggaggcnggttctgcaaagcagggtcagaaacactccccccataccccaa

SEQ ID NO: 203 - DNA, 430 bp, Homo sapiens
  misc_feature (1)...(430): n=a,t,g or c
gttgacctgttatttattgtgcacccattggnagtngcgcctagccctaggcctggcggnangacccaaacatggcctccaagggccaaccttactttgtggaggtgcaagccccagagctggttacaagcatgggnnnggaggagggtggcctagcaggaaggctggggaggcagtgtgtcagccggcacagcnagcgggtagcagaggccccctcttggcgggcagctacttgcacacttggctgaacagagacaatggtggctggtccctccggcccagcctccttcctacaggcagagccccaagtccatgagtctccggaacctccctcagagaacaagcccagctgggaggctgccagagggcaggatgaggggatttcccaggggagagcagcagagaccctctgagctgccagagatgggga

SEQ ID NO: 204 - DNA, 445 bp, Homo sapiens
  misc_feature (1)...(445): n=a,t,g or c
gagaccaagtttcatactcttgttgcccaggccggagtgcaatggtgcgatcttggctcactgcaacctctgcctcccgggtttacgttctttaatgtcctggttatcttctccctaccgcttttatctgaacctttcctttcgtctctactaacttgtctctctgcagctcaatctggattatatttccaacagtttgtcctcagtgacgggctttgttctggaagggtatagtggccagctagcatgaacaacgatagaaccctgtggctggttaccgcttccttaagtcacaaagtcatccctttctggcctgttggagcaaaaattgttgccctgggacacttttaaaaacttttnccttttgaacaggctgggcaatggttaaaccttcntgccaaggcggagaancaatgggaactcgttggccgaaatttcttgggaa

SEQ ID NO: 205 - DNA, 476 bp, Homo sapiens
  misc_feature (1)...(476): n=a,t,g or c
agtattttcataatttatattgcttaaaattatgatttgcatgctaagatgcaaacttacgtgatatcttctttagacataatgctattaagagcacatgctttataaaataaaactggtctcattcatatcaggtgcagaaagccagtcctgaaagcatagactatcccttattctggctgttattaaggaaaaaattcatttaaaaaatacagtaaagattgaaaccaagtttactgtttcttgaacagaataggaagaaaatattttaaatggctgagctggtcattagactattactcatttatcttaaaggcagaaacttgtcaacccaactacgtgaaacagagaagcatgatttgcttaagcaggcgacattagagttaggcctctccacngggagcttccccgaccgtcagcacgtggcagacagggatgcggcccatcattccgcagggaagaaccggccgggccgg

SEQ ID NO: 206 - DNA, 241 bp, Homo sapiens
ttttttagattcatctttttaatgacatcctaaaattcagaggaggggccagcgggacctctgggctcagcggctgtgaaggagggacccgcaacacccgctaaggcaggtaattgcaagaaggcactcgcgagggggacttcaagcccctcttctatttcttcatataaaatcagggggatggggaaagctccaagggcgagggaagcagagagtttctctcccagcctatggaataagg

SEQ ID NO: 207 - DNA, 562 bp, Homo sapiens
  misc_feature (1)...(562): n=a,t,g or c
tagaagaaaagagaagttactttattacaatttgttatctcatcccgaggtcagggccccttgcttagtgggaaaaaaaaccctttaggactgagtctcggaacagcacctgtcctaaacccaacttctctgtgatgcccggatttcttgattttgatccagtagctgctcattttcctgccttttacatttaggagattcaagctctgtcatttcctctagctgcccctgaagtccgtccttcctgcagggcccaactccacgtagagtgagtgcagccacacagcagtaaccagatagagcagcctcccctgcagacatgagcaaagaagggatccagagagccaaggctgtatcatagattcttgtggggtcaaaggggcagtcagtatgtcccggcccctcatccagtggtaccagaggatccagcagtcctggggtggcagtcagcaataaggcggcggccaccgttgggccacagtgagtgacacagcaagaaggaggcccagggagcaggcnacggacaagagcaggntcaccagagctagtgccagcaggaccc

SEQ ID NO: 208 - DNA, 174 bp, Homo sapiens
gtattatatttttattgttggcttaaaaaaattacttctttaacctccttaatttgtcagtttgtgggaggtgaatctcaatggcatcaaaagttatagtcttcttacacttgttaaaaataaagtgtttaaacaagtttgtttccattcacaaacttactcccaactacaaaa

SEQ ID NO: 209 - DNA, 401 bp, Homo sapiens
gtgatttccaaggcctttattttatagggaagaggaataaaagatcaatgctagtgggtgtttcgtcatgagcccaaagcccgttgggagtctctgcgaggtcatttgccctttagattctgcaaaggcaaaaagaaatcgatactgatttttaaaaatatatcttaggagccctggtctcctgctgattccatggatgcctggagcacttgtatctggagaatggagacaatatcaccccaagcccgaattcatttgatgagactactatgtataaaacagttaattatatacataaataacataaaataattctcataaattaaaagtcaaatgatctcccactattcattcaactgagaggtgagagctaggcgcgagtgatggtgggtaaggtgcct

SEQ ID NO: 210 - DNA, 1558 bp, Homo sapiens
cctctgggaaagggcagcaggagccaggtgtggcagtgacagggaggtgtgaatgaggcaggatgaactggacaggtttgtacaccttgctcagtggcgtgaaccggcattctactgccattggccgagtatggctctcggtcatcttcatcttcagaatcatggtgctggtggtggctgcagagagtgtgtggggtgatgagaaatcttccttcatctgcaacacactccagcctggctgcaacagcgtttgctatgaccaattcttccccatctcccatgtgcggctgtggtccctgcagctcatcctagtttccaccccagctctcctcgtggccatgcacgtggctcaccagcaacacatagagaagaaaatgctacggcttgagggccatggggaccccctacacctggaggaggtgaagaggcacaaggtccacatctcagggacactgtggtggacctatgtcatcagcgtggtgttccggctgttgtttgaggccgtcttcatgtatgtcttttatctgctctaccctggctatgccatggtgcggctggtcaagtgcgacgtctacccctgccccaacacagtggactgcttcgtgtcccgccccaccgagaaaaccgtcttcaccgtcttcatgctagctgcctctggcatctgcatcatcctcaatgtggccgaggtggtgtacctcatcatccgggcctgtgcccgccgagcccagcgccgctccaatccaccttcccgcaagggctcgggcttcggccaccgcctctcacctgaatacaagcagaatgagatcaacaagctgctgagtgagcaggatggctccctgaaagacatactgcgccgcagccctggcaccggggctgggctggctgaaaagagcgaccgctgctcggcctgctgatgccacataccaggcaacctgccatccatccccgaccctgccctgggcgaagccctcctccttctcccctgccggtgcacaggcctctgcctgctggggattactcgatcaaaaccttccttccctggctacttcccttcctcccggggccttccttttaggtgctggagctggaggggtggggagctagaggccacctatgccagtgctcaaggttactgggagtgtgggctgcccttgttgcctgcacccttccctcttccctctccctctctctgggaccactgggtacaagagatgggatgctccgacagcgtctccaattatgaaactaatcttaaccctgtgctgtcagataccctggttttctggagtcacagtcagtgaggaggatgtggtaagaggaggcagagggcaggggtgctgtggacatgtgggtggagaagggagggtggccagcactagtaaaggaggaatagtgcttgctggccacaaggaaaaggaggaggtgtctggggtgagggagttagggagagagaagcaggcagataagttggagcaggggtggtcaaggccacctctgcctctagtccccaaggcctctctctgcctgaaatgttacacattaaacaggattttacagt

SEQ ID NO: 211 - DNA, 1520 bp, Homo sapiens
gaattccgggggggggtcccttccgatcctccctcctgacgccccccccagcagccccctcccccaccattgaaagccatgaattttgaatttgagagggagattgggtttataaacagccagccgtcgctcgccgagtgtctgacttccttccccgctgtcttggagacatttcaaacttcatcaatcaaggagtcgacattaattcctcctcctcctcctttcgagcaaaccttccccagcctccagcccggcgcctccacccttcagagacccaggagccaaaagcgagccgaagatgggcctgctctgccgccgccaccgccgccgccactccccgctgcccccccggcccccgagttcccttggatgaaagagaagaaatccgccaagaaacccagccaatccgccacgtctccttctccggccgcctccgccgttccggcctccggggtcggatcgcctgcagatggcctgggactgccggaggctggtggcggcggggcgcgcaggctgcgcacggcttacaccaacacgcagctgctggaactggagaaggaattccactttaataagtacctgtgccggccacgccgcgtcgagatcgcggccttgctggacctcaccgaaaggcaggtcaaagtctggtttcagaaccggcgcatgaagcacaagcggcagacgcagcaccgagagccgccggatggggagcctgcctgcccgggagccctggaggacatctgcgaccctgccgaggaacccgcggccagcccgggcggcccctccgcctcgcgggcggcgtgggaagcctgctgtcacccgccggaggtggtgccgggggccttaagcgcggacccccggcctttagccgttcgcttagagggcgcaggcgcgtcgagtcccggctgcgcgctgcgcggggccggcgggctggagcccgggccattgccagaagacgtcttctcggggcgccaggattcacctttccttcccgacctcaacttcttcgcggccgactcctgtctccagctatccggaggcctctcccctagcctacagggttctctcgacagcccggtccctttttccgaggaagagctggattttttcaccagtacgctctgtgccatcgacctgcagtttccctaacctgtttcctcctcccggtcctttcgacccccgcgctccttggccgtctactggaaaaatcgagcctctcccaccctcagtcgcatagacttatgtgttttgctaaaattcaggtattactgaattagcgtttaatccacttcctttcttcttcttctaaaatattgggcactcggttatcttttaaaattcacacagaaaaattccgtttggtagactccttccaatgaaatctcaggaataattaaactctagggggactttcttaaaaataactagagggacctattttcctcttttttatgttttagactgtagattatttattaaaattctttaataataggaaaaggggaaagtatttattgtac

SEQ ID NO: 212 - DNA, 627 bp, Homo sapiens
agtctccggcgagttgttgcctgggctggacgtggttttgtctgctgcgcccgctcttcgcgctctcgtttcattttctgcagcgcgccacgaggatggcccacaagcagatctactactcggacaagtacttcgacgaacactacgagtaccggcatgttatgttacccagagaactttccaaacaagtacctaaaactcatctgatgtctgaagaggagtggaggagacttggtgtccaacagagtctaggctgggttcattacatgattcatgagccagaaccacatattcttctctttagacgacctcttccaaaagatcaacaaaaatgaagtttatctggggatcgtcaaatctttttcaaatttaatgtatatgtgtatataaggtagtattcagtgaatacttgagaaatgtacaaatctttcatccatacctgtgcatgagctgtattcttcacagcaacagagctcagttaaatgcaactgcaagtaggttactgtaagatgtttaagataaaagttcttccagtcagtttttctcttaagtgcctgtttgagtttactgaaacagtttacttttgttcaataaagtttgtatgttgcatttaaaaaaaaaaaaaaa

SEQ ID NO: 213 - DNA, 4244 bp, Homo sapiens
ggcgcagtagcagcgagcagcagagtccgcacgctccggcgaggggcagaagagcgcgagggagcgcggggcagcagaagcgagagccgagcgcggacccagccaggacccacagccctccccagctgcccaggaagagccccagccatggaacaccagctcctgtgctgcgaagtggaaaccatccgccgcgcgtaccccgatgccaacctcctcaacgaccgggtgctgcgggccatgctgaaggcggaggagacctgcgcgccctcggtgtcctacttcaaatgtgtgcagaaggaggtcctgccgtccatgcggaagatcgtcgccacctggatgctggaggtctgcgaggaacagaagtgcgaggaggaggtcttcccgctggccatgaactacctggaccgcttcctgtcgctggagcccgtgaaaaagagccgcctgcagctgctgggggccacttgcatgttcgtggcctctaagatgaaggagaccatccccctgacggccgagaagctgtgcatctacaccgacaactccatccggcccgaggagctgctgcaaatggagctgctcctggtgaacaagctcaagtggaacctggccgcaatgaccccgcacgatttcattgaacacttcctctccaaaatgccagaggcggaggagaacaaacagatcatccgcaaacacgcgcagaccttcgttgccctctgtgccacagatgtgaagttcatttccaatccgccctccatggtggcagcggggagcgtggtggccgcagtgcaaggcctgaacctgaggagccccaacaacttcctgtcctactaccgcctcacacgcttcctctccagagtgatcaagtgtgacccagactgcctccgggcctgccaggagcagatcgaagccctgctggagtcaagcctgcgccaggcccagcagaacatggaccccaaggccgccgaggaggaggaagaggaggaggaggaggtggacctggcttgcacacccaccgacgtgcgggacgtggacatctgagggcgccaggcaggcgggcgccaccgccacccgcagcgagggcggagccggccccaggtgctccactgacagtccctcctctccggagcattttgataccagaagggaaagcttcattctccttgttgttggttgttttttcctttgctctttcccccttccatctctgacttaagcaaaagaaaaagattacccaaaaactgtctttaaaagagagagagagaaaaaaaaaatagtatttgcataaccctgagcggtgggggaggagggttgtgctacagatgatagaggattttataccccaataatcaactcgtttttatattaatgtacttgtttctctgttgtaagaataggcattaacacaaaggaggcgtctcgggagaggattaggttccatcctttacgtgtttaaaaaaaagcataaaaacattttaaaaacatagaaaaattcagcaaaccatttttaaagtagaagagggttttaggtagaaaaacatattcttgtgcttttcctgataaagcacagctgtagtggggttctaggcatctctgtactttgcttgctcatatgcatgtagtcactttataagtcattgtatgttattatattccgtaggtagatgtgtaacctcttcaccttattcatggctgaagtcacctcttggttacagtagcgtagcgtggccgtgtgcatgtcctttgcgcctgtgaccaccaccccaacaaaccatccagtgacaaaccatccagtggaggtttgtcgggcaccagccagcgtagcagggtcgggaaaggccacctgtcccactcctacgatacgctactataaagagaagacgaaatagtgacataatatattctatttttatactcttcctatttttgtagtgacctgtttatgagatgctggttttctacccaacggccctgcagccagctcacgtccaggttcaacccacagctacttggtttgtgttcttcttcatattctaaaaccattccatttccaagcactttcagtccaataggtgtaggaaatagcgctgtttttgttgtgtgtgcagggagggcagttttctaatggaatggtttgggaatatccatgtacttgtttgcaagcaggactttgaggcaagtgtgggccactgtggtggcagtggaggtggggtgtttgggaggctgcgtgccagtcaagaagaaaaaggtttgcattctcacattgccaggatgataagttcctttccttttctttaaagaagttgaagtttaggaatcctttggtgccaactggtgtttgaaagtagggacctcagaggtttacctagagaacaggtggtttttaagggttatcttagatgtttcacaccggaaggtttttaaacactaaaatatataatttatagttaaggctaaaaagtatatttattgcagaggatgttcataaggccagtatgatttataaatgcaatctccccttgatttaaacacacagatacacacacacacacacacacacacacaaaccttctgcctttgatgttacagatttaatacagtttatttttaaagatagatccttttataggtgagaaaaaaacaatctggaagaaaaaaaccacacaaagacattgattcagcctgtttggcgtttcccagagtcatctgattggacaggcatgggtgcaaggaaaattagggtactcaacctaagttcggttccgatgaattcttatcccctgccccttcctttaaaaaacttagtgacaaaatagacaatttgcacatcttggctatgtaattcttgtaatttttatttaggaagtgttgaagggaggtggcaagagtgtggaggctgacgtgtgagggaggacaggcgggaggaggtgtgaggaggaggctcccgaggggaaggggcggtgcccacaccggggacaggccgcagctccattttcttattgcgctgctaccgttgacttccaggcacggtttggaaatattcacatcgcttctgtgtatctctttcacattgtttgctgctattggaggatcagttttttgttttacaatgtcatatactgccatgtactagttttagttttctcttagaacattgtattacagatgccttttttgtagttttttttttttttatgtgatcaattttgacttaatgtgattactgctctattccaaaaaggttgctgtttcacaatacctcatgcttcacttagccatggtggacccagcgggcaggttctgcctgctttggcgggcagacacgcgggcgcgatcccacacaggctggcgggggccggccccgaggccgcgtgcgtgagaaccgcgccggtgtccccagagaccaggctgtgtccctcttctcttccctgcgcctgtgatgctgggcacttcatctgatcgggggcgtagcatcatagtagtttttacagctgtgttatwctttgcgtgtagctatggaagttgcataattattattattattattataacaagtgtgtcttacgtgccaccacggcgttgtacctgtaggactctcattcgggatgattggaatagcttctggaatttgttcaagttttgggtatgtttaatctgttatgtactagtgttctgtttgttattgttttgttaattacaccataatgctaatttaaagagactccaaatctcaatgaagccagctcacagtgctgtgtgccccggtcacctagcaagctgccgaaccaaaagaatttgcaccccgctgcgggcccacgtggttggggccctgccctggcagggtcatcctgtgctcggaggccatctcgggcacaggcccaccccgccccacccctccagaacacggctcacgcttacctcaaccatcctggctgcggcgtctgtctgaaccacgcgggggccttgagggacgctttgtctgtcgtgatggggcaagggcacaagtcctggatgttgtgtgtrtcgagaggccaaaggctggtggcaagtgcacggggcacagcggagtctgtcctgtgacgcgcaagtctgagggtctgggcggcgggcggctgggtctgtgcatttctggttgcaccgcggcgcttcccagcaccaacatgtaaccggcatgtttccagcagaagacaaaaagacaaacatgaaagtctagaaataaaactggtaaaaccccaaaaaaaaaaaaaaaa

SEQ ID NO: 214 - DNA, 583 bp, Homo sapiens
cccctgcaccccgcccggcatagcaccatgcctgcttgtcgcctaggcccgctagccgccgccctcctcctcagcctgctgctgttcggcttcaccctagtctcaggcacaggagcagagaagactggcgtgtgccccgagctccaggctgaccagaactgcacgcaagagtgcgtctcggacagcgaatgcgccgacaacctcaagtgctgcagcgcgggctgtgccaccttctgccttctctgccccaatgataaggagggttcctgcccccaggtgaacattaactttccccagctcggcctctgtcgggaccagtgccaggtggacacgcagtgtcctggccagatgaaatgctgccgcaatggctgtgggaaggtgtcctgtgtcactcccaatttctgaggtccagccaccaccaggctgagcagtgaggagagaaagtttctgcctggccctgcatctggttccagcccacctgccctcccctttttcgggactctgtattccctcttggggtgaccacagcttctccctttcccaaccaataaagtaaccactttcagcaaaaaaaaaaaaaaaa

SEQ ID NO: 215 - DNA, 983 bp, Homo sapiens
cgcaggggtcccccggccgccgcgatgcagaaatacgagaaactggaaaagattggggaaggcacctacggaactgtgttcaaggccaaaaaccgggagactcatgagatcgtggctctgaaacgggtgaggctggatgacgatgatgagggtgtgccgagttccgccctccgggagatctgcctactcaaggagctgaagcacaagaacatcgtcaggcttcatgacgtcctgcacagcgacaagaagctgactttggtttttgaattctgtgaccaggacctgaagaagtattttgacagttgcaatggtgacctcgatcctgagattgtaaagtcattcctcttccagctactaaaagggctgggattctgtcatagccgcaatgtgctacacagggacctgaagccccagaacctgctaataaacaggaatggggagctgaaattggctgattttggcctggctcgagcctttgggattcccgtccgctgttactcagctgaggtggtcacactgtggtaccgcccaccggatgtcctctttggggccaagctgtactccacgtccatcgacatgtggtcagccggctgcatctttgcagagctggccaatgctgggcggcctctttttcccggcaatgatgtcgatgaccagttgaagaggatcttccgactgctggggacgcccaccgaggagcagtggccctctatgaccaagctgccagactataagccctatccgatgtacccggccacaacatccctggtgaacgtcgtgcccaaactcaatgccacagggagggatctgctgcagaaccttctgaagtgtaaccctgtccagcgtatctcagcagaagaggccctgcagcacccctacttctccgacttctgtccgccctaggccccgggacccccgcctccaggctgggcctggcctatttaagccccctcttgagagggtgagacagtgggggtgcctgg

SEQ ID NO: 216 - DNA, 1285 bp, Homo sapiens
gggctgcctgtgacgcgcggcgcggtcggtcctgcctgtaacggcggcggcggctgctgctccagacacctgcggcggcggcggcgaccccgcggcgggcgcggagatgtggcccctggtagcggcgctgttgctgggctcggcgtgctgcggatcagctcagctactatttaataaaacaaaatctgtagaattcacgttttgtaatgacactgtcgtcattccatgctttgttactaatatggaggcacaaaacactactgaagtatacgtaaagtggaaatttaaaggaagagatatttacacctttgatggagctctaaacaagtccactgtccccactgactttagtagtgcaaaaattgaagtctcacaattactaaaaggagatgcctctttgaagatggataagagtgatgctgtctcacacacaggaaactacacttgtgaagtaacagaattaaccagagaaggtgaaacgatcatcgagctaaaatatcgtgttgtttcatggttttctccaaatgaaaatattcttattgttattttcccaatttttgctatactcctgttctggggacagtttggtattaaaacacttaaatatagatccggtggtatggatgagaaaacaattgctttacttgttgctggactagtgatcactgtcattgtcattgttggagccattcttttcgtcccaggtgaatattcattaaagaatgctactggccttggtttaattgtgacttctacagggatattaatattacttcactactatgtgtttagtacagcgattggattaacctccttcgtcattgccatattggttattcaggtgatagcctatatcctcgctgtggttggactgagtctctgtattgcggcgtgtataccaatgcatggccctcttctgatttcaggtttgagtatcttagctctagcacaattacttggactagtttatatgaaatttgtggcttccaatcagaagactatacaacctcctaggaaagctgtagaggaaccccttaatgcattcaaagaatcaaaaggaatgatgaatgatgaataactgaagtgaagtgatggactccgatttggagagtagtaagacgtgaaaggaatacacttctgtttaagcaccatggccttgatgattcactgttggggagaagaaacaagaaaagtaactggttgtcacctatgagacccttacgtgattgttagttaagtttttattcaaagcagctgtaatttagttaataaaataattatgatc

SEQ ID NO: 217 - DNA, 3151 bp, Homo sapiens
ccggccagcgggcgggctccccagccaggccgctgcacctgtcaggggaacaagctggaggagcaggaccctagacctctgcagcccataccaggtctcatggaggggaacaagctggaggagcaggactctagccctccacagtccactccagggctcatgaaggggaacaagcgtgaggagcaggggctgggccccgaacctgcggcgccccagcagcccacggcggaggaggaggccctgatcgagttccaccgctcctaccgagagctcttcgagttcttctgcaacaacaccaccatccacggcgccatccgcctggtgtgctcccagcacaaccgcatgaagacggccttctgggcagtgctgtggctctgcacctttggcatgatgtactggcaattcggcctgcttttcggagagtacttcagctaccccgtcagcctcaacatcaacctcaactcggacaagctcgtcttccccgcagtgaccatctgcaccctcaatccctacaggtacccggaaattaaagaggagctggaggagctggaccgcatcacagagcagacgctctttgacctgtacaaatacagctccttcaccactctcgtggccggctcccgcagccgtcgcgacctgcgggggactctgccgcaccccttgcagcgcctgagggtcccgcccccgcctcacggggcccgtcgagcccgtagcgtggcctccagcttgcgggacaacaacccccaggtggactggaaggactggaagatcggcttccagctgtgcaaccagaacaaatcggactgcttctaccagacatactcatcaggggtggatgcggtgagggagtggtaccgcttccactacatcaacatcctgtcgaggctgccagagactctgccatccctggaggaggacacgctgggcaacttcatcttcgcctgccgcttcaaccaggtctcctgcaaccaggcgaattactctcacttccaccacccgatgtatggaaactgctatactttcaatgacaagaacaactccaacctctggatgtcttccatgcctggaatcaacaacggtctgtccctgatgctgcgcgcagagcagaatgacttcattcccctgctgtccacagtgactggggcccgggtaatggtgcacgggcaggatgaacctgcctttatggatgatggtggctttaacttgcggcctggcgtggagacctccatcagcatgaggaaggaaaccctggacagacttgggggcgattatggcgactgcaccaagaatggcagtgatgttcctgttgagaacctttacccttcaaagtacacacagcaggtgtgtattcactcctgcttccaggagagcatgatcaaggagtgtggctgtgcctacatcttctatccgcggccccagaacgtggagtactgtgactacagaaagcacagttcctgggggtactgctactataagctccaggttgacttctcctcagaccacctgggctgtttcaccaagtgccggaagccatgcagcgtgaccagctaccagctctctgctggttactcacgatggccctcggtgacatcccaggaatgggtcttccagatgctatcgcgacagaacaattacaccgtcaacaacaagagaaatggagtggccaaagtcaacatcttcttcaaggagctgaactacaaaaccaattctgagtctccctctgtcacgatggtcaccctcctgtccaacctgggcagccagtggagcctgtggttcggctcctcggtgttgtctgtggtggagatggctgagctcgtctttgacctgctggtcatcatgttcctcatgctgctccgaaggttccgaagccgatactggtctccaggccgagggggcaggggtgctcaggaggtagcctccaccctggcatcctcccctccttcccacttctgcccccaccccatgtctctgtccttgtcccagccaggccctgctccctctccagccttgacagcccctccccctgcctatgccaccctgggcccccgcccatctccagggggctctgcaggggccagttcctccacctgtcctctgggggggccctgagagggaaggagaggtttctcacaccaaggcagatgctcctctggtgggagggtgctggccctggcaagattgaaggatgtgcagggcttcctctcagagccgcccaaactgccgttgatgtgtggaggggaagcaagatgggtaagggctcaggaagttgctccaagaacagtagctgatgaagctgcccagaagtgccttggctccagccctgtaccccttggtactgcctctgaacactctggtttccccacccaactgcggctaagtctctttttcccttggatcagccaagcgaaacttggagctttgacaaggaactttcctaagaaaccgctgataaccaggacaaaacacaaccaagggtacacgcaggcatgcacgggtttcctgcccagcgacggcttaagccagcccccgactggcctggccacactgctctccagtagcacagatgtctgctcctcctcttgaacttgggtgggaaaccccacccaaaagccccctttgttacttaggcaattccccttccctgactcccgagggctagggctagagcagacccgggtaagtaaaggcagacccagggctcctctagcctcatacccgtgccctcacagagccatgccccggcacctctgccctgtgtctttcatacctctacatgtctgcttgagatatttcctcagcctgaaagtttccccaaccatctgccagagaactcctatgcatcccttagaaccctgctcagacaccattacttttgtgaacgcttctgccacatcttgtcttccccaaaattgatcactccgccttctcctgggctcccgtagcacactataacatctgctggagtgttgctgttgcaccatactttcttgtacatttgtgtctcccttcccaactagactgtaagtgccttgcggtcagggactgaatcttgcccgtttatgtatgctccatgtctagcccatcatcctgcttggagcaagtaggcaggagctcaataaatgtttgttgcatgaaaaaaaaaaaaaaaaaa

SEQ ID NO: 218 - DNA, 362 bp, Homo sapiens
gctcagcctccaaaggagccagcctctccccagttcctgaaatcctgagtgttgcctgccagtcgccatgagaacttcctaccttctgctgtttactctctgcttacttttgtctgagatggcctcaggtggtaactttctcacaggccttggccacagatctgatcattacaattgcgtcagcagtggagggcaatgtctctattctgcctgcccgatctttaccaaaattcaaggcacctgttacagagggaaggccaagtgctgcaagtgagctgggagtgaccagaagaaatgacgcagaagtgaaatgaactttttataagcattcttttaataaaggaaaattgcttttgaagtat

SEQ ID NO: 219 - DNA, 1610 bp, Homo sapiens
  misc_feature (1)...(1610): n=a,t,g or c
cgtaacaggacaaggagtcctgctccggcacgtggccacagaaaactacttaggaagcctgtggtgagaacaacaacagtgcctggagaatcccacggctctggggaagtgagccccgaggatgaggctgctcgcctggctgattttcctggctaactggggaggtgccagggctgaaccagggaagttctggcacatcgctgacctgcaccttgaccctgactacaaggtatccaaagaccccttccaggtgtgcccatcagctggatcccagccagtgcccgacgcaggcccctggggtgactacctctgtgattctccctgggccctcatcaactcctccatctatgccatgaaggagattgagccagagccagacttcattctctggactggtgatgacacgcctcatgtgcccgatgagaaactgggagaggcagctgtactggaaattgtggaacgcctgaccaagctcatcagagaggtctttccagatactaaagtctatgctgctttgggaaatcatgattttcaccccaaaaaccagttcccagctggaagtaacaacatctacaatcagatagcagaactatggaaaccctggcttagtaatgagtccatcgctctcttcaaaaaaggtgccttctactgtgagaagctgccgggtcccagcggggctgggcgaattgtggtcctcaacaccaatctgtactataccagcaatgcgctgacagcagacatggcggaccctggccagcagttccagtggctggaagatgtgctgaccgatgcatccaaagctggggacatggtgtacattgtcggccacgtgcccccggggttctttgagaagacgcaaaacaaggcatggttccgggagggcttcaatgaaaaatacctgaaggtggtccggaagcatcatcgcgtcatagcagggcagttcttcgggcaccaccacaccgacagctttcggatgctctatgatgatgcaggtgtccccataagcgccatgttcatcacacctggagtcaccccatggaaaaccacattacctggagtggtcaatggggccaacaatccagccatccgggtgttcgaatatgaccgagccacactgagcctnnaggacatggtgacctacttcatgaacctgagccaggcgaatgctcaggggacgccgcgctgggagctcgagtaccagctgaccgaggcctatggggtgccggacgccagcgcccactccatcgacacagtgctggaccgcatcgctggcgaccagagcacactgcagcgctactacgtctataactcagtcagctactctgctggggtctgcgacgaggcctgcagcatgcagcacgtgtgtgccatgcgccaggtggacattgacgcttacaccacctgtctgtatgcctctggcaccacgcccgtgccccagctnccgntgctgctgatggccctgctggggctgtgcacgactcgtgctgtgacctgccaggctcaccattcttcctggtaacgggtaacgggggcagcgcccaggatcacccagagctgggccttccaccatttcctccgcgcctgaggagtgaactgaatggacaccgatc

SEQ ID NO: 220 - DNA, 272 bp, Homo sapiens
aatttctctcatctttatttttattaaaaaaaataaaacagtcaccaccaaccacatgacaactcgccaggcaaggccttgcttccctccctcctttgcgtcccatgtgcctagtcagcaaggtcggggaggcaccgatgttagcttcgcccaaagggagtattacagagagaggcttgggaaagggaaggaaacctggacaggcttttcagcactgagaaatcacttaaaactgatttgctttcagtaactggtatgtctgaaatgcaggg

SEQ ID NO: 221 - DNA, 303 bp, Homo sapiens
  misc_feature (1)...(303): n=a,t,g or c
aacttctgaggttatttttatttttaaatttaacttcaatttctgtttatttaaattttaaaaattattcagattattaaattcatgttagtcttattgtgatcataacagtaggaactgtacagatgattggtagtggctctcaaatgttaaaatacatcagaataacatgggaaacctgctgaaatgcagttnccagcagacttggttttgtcatagcaattggtatttttaacaagcattccaaggattctgatgcagatcgtatcctgaccacactttgagaaaccattatttagtttc

SEQ ID NO: 222 - DNA, 3923 bp, Homo sapiens
cggagctcgaaactgactggaaacttcagtggcgcggagactcgccagtttcaaccccggaaacttttctttgcaggaggagaagagaaggggtgcaagcgcccccacttttgctctttttcctcccctcctcctcctctccaattcgcctccccccacttggagcgggcagctgtgaactggccaccccgcgccttcctaagtgctcgccgcggtagccggccgacgcgccagcttccccgggagccgcttgctccgcatccgggcagccgaggggagaggagcccgcgcctcgagtccccgagccgccgcggcttctcgcctttcccggccaccagccccctgccccgggcccgcgtatgaatctcctggaccccttcatgaagatgaccgacgagcaggagaagggcctgtccggcgcccccagccccaccatgtccgaggactccgcgggctcgccctgcccgtcgggctccggctcggacaccgagaacacgcggccccaggagaacacgttccccaagggcgagcccgatctgaagaaggagagcgaggaggacaagttccccgtgtgcatccgcgaggcggtcagccaggtgctcaaaggctacgactggacgctggtgcccatgccggtgcgcgtcaacggctccagcaagaacaagccgcacgtcaagcggcccatgaacgccttcatggtgtgggcgcaggcggcgcgcaggaagctcgcggaccagtacccgcacttgcacaacgccgagctcagcaagacgctgggcaagctctggagacttctgaacgagagcgagaagcggcccttcgtggaggaggcggagcggctgcgcgtgcagcacaagaaggaccacccggattacaagtaccagccgcggcggaggaagtcggtgaagaacgggcaggcggaggcagaggaggccacggagcagacgcacatctcccccaacgccatcttcaaggcgctgcaggccgactcgccacactcctcctccggcatgagcgaggtgcactcccccggcgagcactcggggcaatcccagggcccaccgaccccacccaccacccccaaaaccgacgtgcagccgggcaaggctgacctgaagcgagaggggcgccccttgccagaggggggcagacagccccctatcgacttccgcgacgtggacatcggcgagctgagcagcgacgtcatctccaacatcgagaccttcgatgtcaacgagtttgaccagtacctgccgcccaacggccacccgggggtgccggccacgcacggccaggtcacctacacgggcagctacggcatcagcagcaccgcggccaccccggcgagcgcgggccacgtgtggatgtccaagcagcaggcgccgccgccacccccgcagcagcccccacaggccccgccggccccgcaggcgcccccgcagccgcaggcggcgcccccacagcagccggcggcacccccgcagcagccacaggcgcacacgctgaccacgctgagcagcgagccgggccagtcccagcgaacgcacatcaagacggagcagctgagccccagccactacagcgagcagcagcagcactcgccccaacagatcgcctacagccccttcaacctcccacactacagcccctcctacccgcccatcacccgctcacagtacgactacaccgaccaccagaactccagctcctactacagccacgcggcaggccagggcaccggcctctactccaccttcacctacatgaaccccgctcagcgccccatgtacacccccatcgccgacacctctggggtcccttccatcccgcagacccacagcccccagcactgggaacaacccgtctacacacagctcactcgaccttgaggaggcctcccacgaagggcgacgatggccgagatgatcctaaaaataaccgaagaaagagaggaccaaccagaattccctttggacatttgtgtttttttgtttttttattttgttttgttttttcttcttcttcttcttccttaaagacatttaagctaaaggcaactcgtacccaaatttccaagacacaaacatgacctatccaagcgcattacccacttgtggccaatcagtggccaggccaaccttggctaaatggagcagcgaaatcaacgagaaactggactttttaaaccctcttcagagcaagcgtggaggatgatggagaatcgtgtgatcagtgtgctaaatctctctgcctgtttggactttgtaattatttttttagcagtaattaaagaaaaaagtcctctgtgaggaatattctctattttaaatatttttagtatgtactgtgtatgattcattaccattttgaggggatttatacatatttttagataaaattaaatgctcttatttttccaacagctaaactactcttagttgaacagtgtgccctagcttttcttgcaaccagagtatttttgtacagatttgctttctcttacaaaaagaaaaaaaaaatcctgttgtattaacatttaaaaacagaattgtgttatgtgatcagttttgggggttaactttgcttaattcctcaggctttgcgatttaaggaggagctgccttaaaaaaaaataaaggccttattttgcaattatgggagtaaacaatagtctagagaagcatttggtaagctttatgatatatatattttttaaagaagagaaaaacaccttgagccttaaaacggtgctgctgggaaacatttgcactcttttagtgcatttcctcctgcctttgcttgttcactgcagtcttaagaaagaggtaaaaggcaagcaaaggagatgaaatctgttctgggaatgtttcagcagccaataagtgcccgagcacactgcccccggttgcctgcctgggccccatgtggaaggcagatgcctgctcgctctgtcacctgtgcctctcagaacaccagcagttaaccttcaagacattccacttgctaaaattatttattttgtaaggagaggttttaattaaaacaaaaaaaaattcttttttttttttttttttccaattttaccttctttaaaataggttgttggagctttcctcaaagggtatggtcatctgttgttaaattatgttcttaactgtaaccagtttttttttatttatctctttaatcttttttattattaaaagcaagtttctttgtattcctcaccctagatttgtataaatgcctttttgtccatcccttttttctttgttgtttttgttgaaaacaaactggaaacttgtttctttttttgtataaatgagagattgcaaatgtagtgtatcactgagtcatttgcagtgttttctgccacagacctttgggctgccttatattgtgtgtgtgtgtgggtgtgtgtgtgttttgacacaaaaacaatgcaagcatgtgtcatccatatttctctacatcttctcttggagtgagggaggctacctggaggggatcagcccactgacagaccttaatcttaattactgctgtggctagagagtttgaggattgctttttaaaaaagacagcaaacttttttttttatttaaaaaaagatatattaacagttttagaagtcagtagaataaaatcttaaagcactcataatatggcatccttcaatttctgtataaaagcagatctttttaaaaaagatacttctgtaacttaagaaacctggcatttaaatcatattttgtctttaggtaaaagctttggtttgtgttcgtgttttgtttgtttcacttgtttccctcccagccccaaaccttttgttctctccgtgaaacttacctttccctttttctttctctttttttttttgtatattattgtttacaataaatatacattgcattaaaaagaaa

SEQ ID NO: 223 - DNA, 580 bp, Homo sapiens
  misc_feature (1)...(580): n=a,t,g or c
ttttttaaataaattttttattacaatgacaggaagactctggatacaaacacatttgctaatataatcactccactggttacctaggcctagacgtacaaaaggacacccatatctcatcaggagaaagacaattttgagtttctgggtgtagtaccaagtggttatgatcaccacgtacgtggtctatccagttaactgtgtggcaatttgctatttcaagtcctctcataacagaaattactgaaatatgtggaacaccagtcaatataaagaattcatttttaaacagactagtgaatttgtgtcataaacacacttgcgtatggatattaggagagcattgcttgaatatctctaaaactatttttaggaattaaaagctttcatagttaatggtatgatattggccttcagaattcatattgataaaagcaaaccttagtcatttaacaggaatgtttaaattttagagattctaacatgcgatgccgaaaaatcctaacatttccacttagtaatgtcagggttgtgccagttctaatttcccatagctagtaacatcagaaaatatntatca

SEQ ID NO: 224 - DNA, 1721 bp, Homo sapiens
gaattccctggctgcttgaatctgttctgccccctccccacccatttcaccaccaccatgacaccgggcacccagtctcctttcttcctgctgctgctcctcacagtgcttacagttgttacaggttctggtcatgcaagctctaccccaggtggagaaaaggagacttcggctacccagagaagttcagtgcccagctctactgagaagaatgctgtgagtatgaccagcagcgtactctccagccacagccccggttcaggctcctccaccactcagggacaggatgtcactctggccccggccacggaaccagcttcaggttcagctgccacctggggacaggatgtcacctcggtcccagtcaccaggccagccctgggctccaccaccccgccagcccacgatgtcacctcagccccggacaacaagccagccccgggctccaccgcccccccagcccacggtgtcacctcggccccggacaccaggccgcccccgggctccaccgcccccccagcccacggtgtcacctcggccccggacaccaggccgcccccgggctccaccgcgcccgcagcccacggtgtcacctcggccccggacaccaggccggccccgggctccaccgcccccccagcccatggtgtcacctcggccccggacaacaggcccgccttggcgtccaccgcccctccagtccacaatgtcacctcggcctcaggctctgcatcaggctcagcttctactctggtgcacaacggcacctctgccagggctaccacaaccccagccagcaagagcactccattctcaattcccagccaccactctgatactcctaccacccttgccagccatagcaccaagactgatgccagtagcactcaccatagcacggtacctcctctcacctcctccaatcacagcacttctccccagttgtctactggggtctctttctttttcctgtcttttcacatttcaaacctccagtttaattcctctctggaagatcccagcaccgactactaccaagagctgcagagagacatttctgaaatgtttttgcagatttataaacaagggggttttctgggcctctccaatattaagttcaggccaggatctgtggtggtacaattgactctggccttccgagaaggtaccatcaatgtccacgacgtggagacacagttcaatcagtataaaacggaagcagcctctcgatataacctgacgatctcagacgtcagcgtgagtgatgtgccatttcctttctctgcccagtctggggctggggtgccaggctggggcatcgcgctgctggtgctggtctgtgttctggttgcgctggccattgtctatctcattgccttggctgtctgtcagtgccgccgaaagaactacgggcagctggacatctttccagcccgggatacctaccatcctatgagcgagtaccccacctaccacacccatgggcgctatgtgccccctagcagtaccgatcgtagcccctatgagaaggtttctgcaggtaatggtggcagcagcctctcttacacaaacccagcagtggcagccacttctgccaacttgtaggggcacgtcgccctctgagctgagtggccagccagtgccattccactccactcagggctctctgggccagtcctcctgggagcccccaccacaacacttcccaggcatggaattcc

SEQ ID NO: 225 - DNA, 5938 bp, Homo sapiens
tttccaggcactctcattcatagagccagcgggcgcgggcgggacgggcgccccgcggccggacccagccagggcaccacgctgcccggccctgcgccgccaggcacttctttccggggctcctagggacgccagaaggaagtcaacctctgctgcttctccttggcctgcgttggaccttcctttttttgttgtttttttttgtttttcccctttcttccttttgaattaactggcttcttggctggatgttttcaacttctttcctggctgcgaactttttccccaattgttttccttttacaacagggggagaaagtgctctgtggtccgaggcgagccgtgaagttgcgtgtgcgtggcagtgtgcgtggcaggatgtgcgtgcgtgtgtaacccgagccgcccgatctgtttcgatctgcgccgcggagccctccctcaaggcccgctccacctgcttggcggttacgcggcgctcgtgggtgttcgtgccttcggagcagctaaccggcgggtgctgggcgacggtggaggagtatcgttctcgctgcttgcccgagtcagggctgagtcaccccagctgatgtagacagtggctgccttccgaagagtgcgtgtttgcatgtgtgtgactctgcggctgctcaactcccaacaaaccagaggaccagccacaaacttaaccaacatccccaaacccgagttcacagatgtgggagagctgtagaaccctgagtgtcatcgactgggccttcttatgattgttgttttaagattagctgaagatctctgaaacgctgaattttctgcactgagcgtttgacagaattcattgagagaacagagaacatgacaagtacttctagctcagcactgctccaactactgaagctgattttcaaggctacttaaaaaaatctgcagcgtacattaatggatttctgttgtgtttaaattctccacagattgtattgtaaatattttatgaagtagagcatatgtatatatttatatatacgtgcacatacattagtagcactacctttggaagtctcagctcttgcttttcgggactgaagccagttttgcatgataaaagtggccttgttacgggagataattgtgttctgttgggactttagacaaaactcacctgcaaaaaactgacaggcattaactactggaacttccaaataatgtgtttgctgatcgttttactcttcgcataaatattttaggaagtgtatgagaattttgccttcaggaacttttctaacagccaaagacagaacttaacctctgcaagcaagattcgtggaagatagtctccactttttaatgcactaagcaatcggttgctaggagcccatcctgggtcagaggccgatccgcagaaccagaacgttttcccctcctggactgttagtaacttagtctccctcctcccctaaccacccccgcccccccccaccccccgcagtaataaaggcccctgaacgtgtatgttggtctcccgggagctgcttgctgaagatccgcgcccctgtcgccgtctggtaggagctgtttgcagggtcctaactcaatcggcttgttgtgatgcgtatccccgtagatgccagcacgagccgccgcttcacgccgccttccaccgcgctgagcccaggcaagatgagcgaggcgttgccgctgggcgccccggacgccggcgctgccctggccggcaagctgaggagcggcgaccgcagcatggtggaggtgctggccgaccacccgggcgagctggtgcgcaccgacagccccaacttcctctgctccgtgctgcctacgcactggcgctgcaacaagaccctgcccatcgctttcaaggtggtggccctaggggatgttccagatggcactctggtcactgtgatggctggcaatgatgaaaactactcggctgagctgagaaatgctaccgcagccatgaagaaccaggttgcaagatttaatgacctcaggtttgtcggtcgaagtggaagagggaaaagcttcactctgaccatcactgtcttcacaaacccaccgcaagtcgccacctaccacagagccatcaaaatcacagtggatgggccccgagaacctcgaaataatgagtgtgtatatggcaactaccctgaaatacctttggaagaaatgccagatgcagatggagtagccagcactccctccctcaatattcaagagccatgctctcctgccacatccagtgaagcattcactccaaaggagggttctccttacaaagcccccatctacatccctgatgatatccccattcctgctgagtttgaacttcgagagtcaaatatgcctggggcaggactaggaatatggaccaaaaggaagatcgaagtaggtgaaaagtttgggccttatgtgggagagcagaggtcaaacctgaaagaccccagttatggatgggagatcttagacgaattttacaatgtgaagttctgcatagatgccagtcaaccagatgttggaagctggctcaagtacattagattcgctggctgttatgatcagcacaaccttgttgcatgccagataaatgatcagatattctatagagtagttgcagacattgcgccgggagaggagcttctgctgttcatgaagagcgaagactatccccatgaaactatggcgccggatatccacgaagaacggcaatatcgctgcgaagactgtgaccagctctttgaatctaaggctgaactagcagatcaccaaaagtttccatgcagtactcctcactcagcattttcaatggttgaagaggactttcagcaaaaactcgaaagcgagaatgatctccaagagatacacacgatccaggagtgtaaggaatgtgaccaagtttttcctgatttgcaaagcctggagaaacacatgctgtcacatactgaagagagggaatacaagtgtgatcagtgtcccaaggcatttaactggaagtccaatttaattcgccaccagatgtcacatgacagtggaaagcactatgaatgtgaaaactgtgccaaggttttcacggaccctagcaaccttcagcggcacattcgctctcagcatgtcggtgcccgggcccatgcatgcccggagtgtggcaaaacgtttgccacttcgtcgggcctcaaacaacacaagcacatccacagcagtgtgaagccctttatctgtgaggtctgccataaatcctatactcagttttcaaacctttgccgtcataagcgcatgcatgctgattgcagaacccaaatcaagtgcaaagactgtggacaaatgttcagcactacgtcttccttaaataaacacaggaggttttgtgagggcaagaaccattttgcggcaggtggattttttggccaaggcatttcacttcctggaaccccagctatggataaaacgtccatggttaatatgagtcatgccaacccgggccttgctgactattttggcgccaataggcatcctgctggtcttacctttccaacagctcctggattttcttttagcttccctggtctgtttccttccggcttgtaccacaggcctcctttgatacctgctagttctcctgttaaaggactatcaagtactgaacagacaaacaaaagtcaaagtcccctcatgacacatcctcagatactgccagctacacaggatattttgaaggcactatctaaacacccatctgtaggggacaataagccagtggagctccagcccgagaggtcctctgaagagaggccctttgagaaaatcagtgaccagtcagagagtagtgaccttgatgatgtcagtacaccaagtggcagtgacctggaaacaacctcgggctctgatctggaaagtgacattgaaagtgataaagagaaatttaaagaaaatggtaaaatgttcaaagacaaagtaagccctcttcagaatctggcttcaataaataataagaaagaatacagcaatcattccattttctcaccatctttagaggagcagactgcggtgtcaggagctgtgaatgattctataaaggctattgcttctattgctgaaaaatactttggttcaacaggactggtggggctgcaagacaaaaaagttggagctttaccttacccttccatgtttcccctcccattttttccagcattctctcaatcaatgtacccatttcctgatagagacttgagatcgttacctttgaaaatggaaccccaatcaccaggtgaagtaaagaaactgcagaagggcagctctgagtccccctttgatctcaccactaagcgaaaggatgagaagcccttgactccagtcccctccaagcctccagtgacacctgccacaagccaagaccagcccctggatctaagtatgggcagtaggagtagagccagtgggacaaagctgactgagcctcgaaaaaaccacgtgtttgggggaaaaaaaggaagcaacgtcgaatcaagacctgcttcagatggttccttgcagcatgcaagacccactcctttctttatggaccctatttacagagtagagaaaagaaaactaactgacccacttgaagctttaaaagagaaatacttgaggccttctccaggattcttgtttcacccacaaatgtcagctattgaaaacatggcagaaaagctagagagcttcagtgccctgaaacctgaggccagtgagctcttacagtcagtgccctctatgttcaacttcagggcgcctcccaatgccctgccagagaaccttctgcggaagggaaaggagcgctatacctgcagatactgtggcaagatttttccaaggtctgcaaacctaacacggcacttgagaacccacacaggagagcagccttacagatgcaaatactgtgacagatcatttagcatatcttctaacttgcaaaggcatgttcgcaacatccacaataaagagaagccatttaagtgtcacttatgtgataggtgttttggtcaacaaaccaatttagacagacacctaaagaaacatgagaatgggaacatgtccggtacagcaacatcgtcgcctcattctgaactggaaagtacaggtgcgattctggatgacaaagaagatgcttacttcacagaaattcgaaatttcattgggaacagcaaccatggcagccaatctcccaggaatgtggaggagagaatgaatggcagtcattttaaagatgaaaaggctttggtgaccagtcaaaattcagacttgctggatgatgaagaagttgaagatgaggtgttgttagatgaggaggatgaagacaatgatattactggaaaaacaggaaaggaaccagtgacaagtaatttacatgaaggaaaccctgaggatgactatgaagaaaccagtgccctggagatgagttgcaagacatccccagtgaggtataaagaggaagaatataaaagtggactttctgctctagatcatataaggcacttcacagatagcctcaaaatgaggaaaatggaagataatcaatattctgaagctgagctgtcttcttttagtacttcccatgtgccagaggaacttaagcagccgttacacagaaagtccaaatcgcaggcatatgctatgatgctgtcactgtctgacaaggagtccctccattctacatcccacagttcttccaacgtgtggcacagtatggccagggctgcggcggaatccagtgctatccagtccataagccacgtatgacgttatcaaggttgaccagagtgggaccaagtccaacagtagcatggctctttcatataggactatttacaagactgctgagcagaatgccttataaacctgcagggtcactcatctaaagtctagtgaccttaaactgaatgattta

SEQ ID NO: 226 - DNA, 2727 bp, Homo sapiens
cacgagaagacaggaggaagaaagggagagagggccaggcagtcgcactgtgaacagaacaggagaaggcgaagcggggcaaagttccctgcccaccgacgccagcctgcttggatgacttgcctcgtttcataattcacttactgtctgcaccagccggcctcagcctggctggaccctgctgcctgtgtggcccggagccagaggcccccacactcccagctgctcttctacagatgccatcaacgagcaggactctgggtggctccactgtctaagcctggagagtcaccgccgagggatgaggacgcgccagcccgggggaacgcgccagctgctttcgcggccccaagcgcgcagtgcccagcagccgcgccgagcctgacacgctgtcctctcccctcgcgcacagggctctgcgagtgacccggcgggcgagctccgtgctgcatggaacggctgcagaagcaaccacttacctcccccgggagcgtgagcccctcccgagattccagtgtgcctggctctccctccagcatcgtggccaagatggacaatcaggtgctgggctacaaggacctggctgccatccccaaggacaaggccatcctggacatcgagcggcccgacctcatgatctacgagcctcacttcacttattccctcctggaacacgtggagctgcctcgccagcgcgagcgctcgctgtcacccaaatccacatcccccccaccatccccagaggtgtgggcggacagccggtcgcctggaatcatctctcaggcctcggcccccagaaccactggaaccccccggaccagcctgccccatttccaccaccctgagacctcccgcccagattccaacatctacaagaagcctcccatctataagcagagagagtccgtgggaggcagccctcagaccaagcacctcatcgaggatctcatcatcgagtcatccaagtttcctgcagcccagcccccagaccccaaccagccagccaaaatcgaaaccgactactggccatgccccccgtctctggctgttgtggagacagaatggaggaagcggaaggcgtctcggaggggagcagaggaagaggaggaggaggaagatgacgactctggagaggagatgaaggctctcagggagcgtcagagagaggaactcagtaaggttacttccaacttgggaaagatgatcttgaaagaagagatggaaaagtcattgccgatccgaaggaaaacccgctctctgcctgaccggacacccttccatacctccttgcaccagggaacgtctaaatcttcctctctcccccgctatggcaggaccaccctgagccggctacagtccacagagttcagcccatcagggagtgagactggaagcccaggcctgcagaacggagagggccagagggggaggatggaccgggggaactccctgccctgtgtgctggagcagaagatctatccctatgaaatgctagtggtgaccaacaaggggcgaaccaagctgccaccgggggtggatcggatgcggcttgagaggcatctgtctgccgaggacttctcaagggtatttgccatgtcccctgaagagtttggcaagctggctctgtggaagcggaatgagctcaagaagaaggcctctctcttctgatggcccccacctgctccgggacggcccccttacccctgctgcttcagggtttttccccggcgggttgggaggggcaggaggtggggtggaaatagggtgggctcctttcctcaggtagagtggggggccaaaacctctgcagtccccggcagtgagctatggactttcttccccctcacgaggctgggggcctcctgctctcgtccctggccctccctgtacagggcaaagccagtctgggctctggcacacagagttcatgtttgccgccctctccctgcccctcaccccagaggtgagaggaatgaggggcattggtggttaggccggttggctgtcttgaacagctggagggaagatgcaggggtgggaagcggccaggcagaaagagctccaggctcttgtgtcgcccacccagccctcccatactcactcctgacagctttcctgcactgcagcttcctgctcctctgactctagtgggaacaggccccagctcagcctccgcgagggaggtcacccctccacttcagcttgccctgacctccgctcgcaaaccccgagcttccaagccttttgctccagccctgcggcttccccagaagcctgggcttagggtggagatgccgcctacccgatcctggccctccacctgcctccaggccacgaaatgggaattccagcactaagccaggcaccgggcagaagctgggccttccgcctcccttggatggggtcaagaggccaggcctggcacattttggagtgtcctggctaccagctctcacacctacacccacgcaccccctcacacactatgctctctcaagaatgtaatttattggggcccccccagctgctttcctcacctgcccctgccctaccttacacccccagcttgacttctttccagtccacgtggatataatgatatctatatttttgcccaggtctgggtattgctcctgcccagaccctgacatccctttccactgtgtgtgtgaccatgctgggggagggggactctgcttggaattaaaaggttgctttgggtcccta

SEQ ID NO: 227 - DNA, 184 bp, Homo sapiens
gtggcgacgctgtgacgcttctgtttttcagaacatctgttccccaaatcataactgccaagttcttcgtgtacttggaatctccttgggttacttgtagctggtgccatttctcctcatcaacccaaatcccgcttcccagatggaccttgccattgtctaggatatacttgtccatgacagg

SEQ ID NO: 228 - DNA, 451 bp, Homo sapiens
  misc_feature (1)...(451): n=a,t,g or c
catgataatttagtttacttctgaatattttaaatattacgaaaacaagtataacagctttgttttcaaaactcttttgaggtatcagccattaaaagattaaggtttttgtaaaaaaaaaacacagtggtttattgaatacttacaacgtttacaccttcaatattaattaaattccatttagttttagaggacggaagtgcacaaaacaagtggctgtnggaaacatcttcaaagagggaacgaccacagatgaatggatagcactagataccgaccccaacggaaatgttagcggccctgttttctgctttgaaataaaactttataatacccaggaatatttatatccaaaggccaagtattaaagatacactttcacaaacggcactagtgcccactgnctttaatctggaagggggttgagttagggttggcggggggggcaacc

SEQ ID NO: 229 - DNA, 379 bp, Homo sapiens
tactatctagagtctagagctcacagtacagagttttgtgaaatacggtgcctatgagaattttcccatggtacacagaagccacagaggtgccctgaagcacagagccattgttggcatacacggtgctcaccctgggcttctcagacaaaacattctggatgcgaagtacttctgatcctggagggtcctcagggttatagttcagtagcttcataggattaggatggcatcctgccaaaatgtctcctgtggcaggatcgacagtcaggttatccactaaggtgcccaactgtatcaccttcagttgagttaaatcccagttatcatgtttttccattatgtgaatggtcctaactgctacatcagctacatagac

SEQ ID NO: 230 - DNA, 382 bp, Homo sapiens
ttgaaaataacaaaaaaaccaaactttacttgcatttagccattaataaataatttacagtatgtacacgcggtgacactccacacaggtcgcagaacggtggacgcagtgaggggtccccacttccaagcagaacgtgagcaaacacaaccaaaataaagtgcttcactttttacttccaacatagggaccaactaaaaccagcagggagagggaggggccgggccgagtcgccctcccacccgcccacacacggttctggcagagggagcaggacctcttggagggagggggagacacacgttctgcagcctcctggccagtgtatgagaggtccctggggaacagcagaggggctgccgatgggtgggtagggtgtgga

SEQ ID NO: 231 - DNA, 343 bp, Homo sapiens
ctgatcagactctttttattgttttgttttttataaacaagtctcaggtggaaaaagaaagaaagggaggagctagctctctgccttctcagccaattgaaatcgtggaaaccaatgggcttcagctagccccactcatcactgctgggggggaaaagacatccctactccccttccccgtggcactcatgatattctcaatgccccaacaagggtcatcttggttcctctcggcgtttctgtcctggcctttggctctggctccggctctgactccgactccggctccggccagggccccgggagcccctagagctgctggagcccctgggaagagttgctg

SEQ ID NO: 232 - DNA, 481 bp, Homo sapiens
tttttttttttaaaaaaagaaaacaatgtttattaggatattctggggtgagaggatggccaaagggactatgtacattctgtagtgcttgagcaataggctaacagaaaattcgaacatcacaaaaccacttccaaagtccatattgcaaaacttgtacttctacaggagatgttcttccaagggtgttggcaataaaggctgttgcaaaacagctatgtgaggcagccatgtgggagtgaccccaggagaatgctccggtgtcctctggaaagcagatacacaggacgatggacaaatgtgtcatcttctaccagtgggaagctcagtaaacacacaatataacatggagacccgcccgaagcctaactggaggcttctcaacaaagctcagtcgacccctcacccctgttccgaggagactgggtgtctgaacccctcactcaggaatgaattctaaaaataccctaaaaatcagaag

SEQ ID NO: 233 - DNA, 427 bp, Homo sapiens
ttgacattacaaagtattttaattcttttaacttagtccagacacaagaagccagattatattttaggtgtcgacagaactatttttttaaaatagcaagttcaggtgagttagtagtcatgaaaattaaaatgaaataccaattccatttcctcgtgtacctctttgcaaatgtcggacaaagcagagttttataatagtttaataacttgtgtaacaacggtggctttggtgtatctctaaagtggagtctttaaattataaaggattttgtgtgcttgaaatcattttcactcattgtcgtggctttagatgaagaattactcttctggaaggaggtttcttttgaaaagtagcctttcctctgagcatagcatacaccaaggccacaaacggaaatcactaaggccacaactactacggctgc

SEQ ID NO: 234 - DNA, 443 bp, Homo sapiens
ggctgttaacattgttttatttcctttatacaaaaagtagaaatgacagaaaaaacactcttgacagaaacaataccactgacctgatctcatgaaggagctgagccaaatctgcccacattatggggaaagggaggttcaatcaacattagcaaatactcatgcaattgatgaaatataaaatggtatcagtggcttggtgaatgtcctgtgggtagggtgaatcaatctactcttaaaaaacgtacattttcccaatcatgcttttaaacggcatcttttaaaaaaacaagttatatatacagatatcaccccaaaatgaatcttttacagtctactactataaatttaaggcatcctgatattctgttcttctgctggtgaggcattgttttcatggttctctttccaaagaggatagtccagaaatttccaataatttc

SEQ ID NO: 235 - DNA, 439 bp, Homo sapiens
ttttctttttcatgatctttatttatcctcgagacgcttggatccagtaagcgagtgacaatttcaagactgccagccatgcacctctgtatgtttttggcccaagcagcagccgtggccgtagtgccaaccctcacacgctagctacctcctcctgtgcttggagtggaaagtctgtggggttctctgtctggttctgcaagcttttcacaccatctcttcgctgtctgtctctatgctaggggtttcacacaactctacaccattgcattcatgcttgccgtatccctgactttctgcacaagtgcagggcagagatggcccttttgttttggtgagggagagagggaaacacttgggcacaaagaggggaagggactgtgaatcccagggagcaccctggccagatcccagcggtgttcgaatcccaggaccatct

SEQ ID NO: 236 - DNA, 415 bp, Homo sapiens
tttttttttatttcaaaactatatatatgagatttatttcacattttctacctactcagtcatgtgagctgttgctacatttgtgaactttctgacaccaagtgacaaatatccacaaaagatcatttacaatgtagacatcactaaagtctagatttaaaagtccagtgaaaatggcacacagttggcttacagaaataaaaaagtacaatatatttgaaatagtagggtttttgttttccatttatgcctacatcatggtgttacctatggatatgttatcaacgatattgatatcagatactatgacccatgacatttagtatttttagcaataagaagcacacttaaatctatttcaaaaatatgacatgttaaattcttaggaaagtatcaactttacaaagtatcatac

SEQ ID NO: 237 - DNA, 283 bp, Homo sapiens
tttacgatttaaaattttaattgttaccaaacaaaaatatccactcaaaatacaattcaacaatgcaacagtcatcttacagcagagaaatgcagagaaaagcaaaactgcaagtgactgtgaataaagggtgaatgtagtctcaaatcctcaaagagttgtgtttatttcatcgacaaatagattattcgtattcaattctgatgtgttttaaagactaagatgctcattttacgattagcgcacatgtgtatattgtcacctgttctccttagaaaaatgc

SEQ ID NO: 238 - DNA, 288 bp, Homo sapiens
tttcatgctttttatttttcggtttatttaatcttctttaacacagccattgttggttcaacaatccaatatttgaggttacattattgcaaaaataaggacatagctgaataggttatgccatcaatatgtttgttaatcctatcccttttattaaagacaaagcacagtttgttaatattgtcttggattaactctatttgtaaggttacttatagtggttcatactaaaggcaggggatttgcttcctgggccaattgtctttaaactataatttaagaaatcat

SEQ ID NO: 239 - DNA, 488 bp, Homo sapiens
acatggctatttcatttatttagtagttttgaaatgttagcaaatataaggtatttgtaaagcatctttcattataaagagattagtaatattcaccaatcatgccaatgagattatacactctgccaaagactactagaaaaatttgatcattattaaattcaatgttatttgacagtgtgaactctatgtaacagcacaaattctggactttgaatctggctgctgtcctcacctgaaccattaaaatgaccttgttaacaaggaaggaatcaatggggatatatcacaaccagagattggctgtgtgtccaagggtgctttgtcttgttgccaggatcagactgtgaaatcacagaggcaagctgatgtcatcagaggtgactctgcctatttcaagtcctataatcaccccatgggattcaacagcagtaggaaaacatcacattctcttaatggacaccccatatttgtagaaacagttatga

SEQ ID NO: 240 - DNA, 513 bp, Homo sapiens
ttttttacattttattagaatctttttatttttttctgcagaaaacatttgagatgctcatttgatataaacatctaattccaagagagaccagtgctcaaatatagttttttcagctaccatttgatacggccataaatttggatggtccatgttacaatccttccacaattctccacttaaagacatcatttttctatgtttttaatgactattgccatctaacaattctacaattcgcctctttgcctgtaaaaaggccaactctacgtccacctgtgtctcatattgctatcttttatttatctctgcttaagattgcaaaagtttttgattttattattcacctgaacaatgtattgcaattccaatacacccccatctcttgctgttatctacagcttgtgacaaaatgaacaccttgtagaaatatcctactggttgggtttcccaagtctatgacaccaagagagaagcattgctgatggattgacgaggagaccaccagatcat

SEQ ID NO: 241 - DNA, 320 bp, Homo sapiens
tttttttttttgtggttataatgagctcaaagcctgtgccggtctggtctgtgaaaggtgaggcgaggtcaacaccccgggcagaagtcaggggggccactctagccatggcatcaggagtggtccaggcacatctctgggtcctgaggagcccccagcccagggtggctctgcctgaggcccaggtgtaaatcccaagtcttggggtctctgaggggcactgtcttcaaagggtcaactggcatgtgcagctcattgtactcatcctggccatcctcatcggagtttggttcaacatctccggattcaagcggctgaag

SEQ ID NO: 242 - DNA, 398 bp, Homo sapiens
aattaagaaatcagatttaatcataaacttgtgaaaggaacaaattcaatttttaataacttttatatcaatggaagaagcattttcaattggcaaaactagaggtttctccctaattttctgtctgaatttttataaataaaatgcattatttagctgaaattttaaaaatatttttttcactagacgttagagcaatcttagattttaaataaattgttaagtatcatgaacatgttatttaagatttaaaataaagctaagatttgctttacattgtggcaaatatatacattttagaaaacaaactttgtatttagtcaacataatttttaaaataactaggttgtggatacacataattttctgcagtaattgacgacagatgaaactacatt

SEQ ID NO: 243 - DNA, 2263 bp, Homo sapiens
gcacgagaagaatttaggaatttctgattcatttaaaggatttacaaattcatcaacccctgaaaactaaagcaaattgaacaggaaaaaaaaaaagaagatgggttttttaagtccaatatatgttattttcttcttttttggagtcaaagtacattgccaatatgaaacttatcagtgggatgaagactatgaccaagagccagatgatgattaccaaacaggattcccatttcgtcaaaatgtagactacggagttccttttcatcagtatactttaggctgtgtcagtgaatgcttctgtccaactaactttccatcatcaatgtactgtgataatcgcaaactcaagactatcccaaatattccgatgcacattcagcaactctaccttcagttcaatgaaattgaggctgtgactgcaaattcattcatcaatgcaactcatcttaaagaaattaacctcagccacaacaaaattaaatctcaaaagattgattatggtgtgtttgctaagcttccaaatctactacaacttcatctagagcataataatttagaagaatttccatttcctcttcctaaatctctggaaagactccttcttggttacaatgaaatctccaaactgcagacaaatgctatggatgggctagtaaacttgaccatgcttgatctctgttataattatcttcatgattctctgctaaaagacaaaatctttgccaaaatggaaaaactaatgcagctcaacctctgcagtaacagattagaatcaatgcctcctggtttgccttcttcacttatgtatctgtctttagaaaataattcaatttcttctatacccgaaaaatacttcgacaaacttccaaaacttcatactctaagaatgtcacacaacaaactacaagacatcccatataatatttttaatcttcccaacattgtagaactcagtgttggacacaacaaattgaagcaagcattctatattccaagaaatttggaacacctatacctacaaaataatgaaatagaaaagatgaatcttacagtgatgtgtccttctattgacccactacattaccaccatttaacatacattcgtgtggaccaaaataaactaaaagaaccaataagctcatacatcttcttctgcttccctcatatacacactatttattatggtgaacaacgaagcactaatggtcaaacaatacaactaaagacacaagttttcaggagatttccagatgatgatgatgaaagtgaagatcacgatgatcctgacaatgctcatgagagcccagaacaagaaggagcagaagggcactttgaccttcattattatgaaaatcaagaatagcaagaaactatataggtatacacttacgacttcacaaaacctatacttaatatagtaaatctaagtaaacatgtattactcaaagtaatatatttagaattatgtattagtataagatcagaattgaatttaagttgttggtgacatctgcatcatttcataggattagaacttactcaaaataatgtaaatctttaaaaatataaattagaatgacaagtgggaatcataaattaaacgttaatggtttcttatgctctttttaaatatagaaatatcatgttaaagaaagtgagtgtatcatttctattaacagtaatttttctaaaaatgaggaaggaagtagcattagcagtaaagacccacaggccacgaccctcctgatcactctgaggacaatatttaaatgacaggaaggtatattaatgtaacaagcattcatttaaggaatagaccattttctctgacctcttcttcaggaaagctttcacactggtatttgtgatctcaccattatgacatccatccccctagctcaccacatagcacatagaatgatatttttgatttgtaagaggccatccaggtactaaggacccaaggcatacagattcacaaaattaactaatctttttgcctcagaataccaaaacaacaaaattataaagctgttatttggacaactaaaaaacaccaaactatctcattgcaatttgtattttagcagatttcagcaactatcctaaacaatgttattgtgttccattttaactgggataaatgtttttgtaaaaatacaaccatagaaaggcctctttgttacaaaatgatttgcaaagaaataactgctttgtttgcaagattaaattagtgttggcaaaataaagttctaaagat

SEQ ID NO: 244 - DNA, 407 bp, Homo sapiens
atcytatcmghcmcaamcggtttattycttttcgwcgggaaaaaattaaaccmmattcmaacggtgyttaacttacaggcagraaccaaagtagscatttawtgcgttagatatcggatacaagacatacacyggggagaatgcttcaccatctgamgmtcacaccacaayggcccagtggacagctgtgcactctgctcgtgcttamgygccycggystggcychggggacggcgtgtcygmagaacagaagaacagctgtgtttcacamgtactgacgcattttcgactgcayccggggggtatatattttyhcscygmcgggrcghggggaaatcagcaaagtccctcccacagagcattmggctgcctygcagagagccacggcagagamgcggacttctcct

SEQ ID NO: 245 - DNA, 3388 bp, Homo sapiens
aattcggagaacctgctacaggaacagctgcaggcagagacagagctgtatgcagaggctgaggagatgcgggtgcggctggcggccaagaagcaggagctggaggagatactgcatgagatggaggcccgcctggaggaggaggaagacaggggccagcagctacaggctgaaaggaagaagatggcccagcagatgctggaccttgaagaacagctggaggaggaggaagctgccaggcagaagctgcaacttgagaaggtcacggctgaggccaagatcaagaaactggaggatgagatcctggtcatggatgatcagaacaataaactatcaaaagaacgaaaactccttgaggagaggattagtgacttaacgacaaatcttgcagaagaggaagaaaaggccaagaatcttaccaagctgaaaaacaagcatgaatctatgatttcagaactggaagtgcggctaaagaaggaagagaagagccgacaggagctggagaagctgaaacggaagctggagggtgatgccagcgacttccacgagcagatcgctgacctccaggcgcagatcgcagagctcaagatgcagctggccaagaaggaggaggagctgcaggcggccctggccaggcttgacgatgaaatcgctcagaagaacaatgccctgaagaagatccgggagctggagggccacatctcagacctccaggaggacctggactcagagcgggccgccaggaacaaggctgaaaagcagaagcgagacctcggcgaggagctggaggccctaaagacagagctggaagacacactggacagcacagccactcagcaggagctcagggccaagagggagcaggaggtgacggtgctgaagaaggccctggatgaagagacgcggtcccatgaggctcaggtccaggagatgaggcagaaacacgcacaggcggtggaggagctcacagagcagcttgagcagttcaagagggccaaggcgaacctagacaagaataagcagacgctggagaaagagaacgcagacctggccggggagctgcgggtcctgggccaggccaagcaggaggtggaacataagaagaagaagctggaggcgcaggtgcaggagctgcagtccaagtgcagcgatggggagcgggcccgggcggagctcaatgacaaagtccacaagctgcagaatgaagttgagagcgtcacagggatgcttaacgaggccgaggggaaggccattaagctggccaaggacgtggcgtccctcagttcccagctccaggacacccaggagttgcttcaagaagaaacccggcagaagctcaacgtgtctacgaagctgcgccagctggaggaggagcggaacagcctgcaagaccagctggacgaggagatggaggccaagcagaacctggagcgccacatctccactctcaacatccagctctccgactcgaagaagaagctgcaggactttgccagcaccgtggaagctctggaagaggggaagaagaggttccagaaggagatcgagaacctcacccagcagtacgaggagaaggcggccgcttatgataaactggaaaagaccaagaacaggcttcagcaggagctggacgacctggttgttgatttggacaaccagcggcaactcgtgtccaacctggaaaagaagcagaggaaatttgatcagttgttagccgaggagaaaaacatctcttccaaatacgcggatgagagggacagagctgaggcagaagccagggagaaggaaaccaaggccctgtccctggctcgggcccttgaagaggccttggaagccaaagaggaactcgagcggaccaacaaaatgctcaaagccgaaatggaagacctggtcagctccaaggatgacgtgggcaagaacgtccatgagctggagaagtccaagcgggccctggagacccagatggaggagatgaagacgcagctggaagagctggaggacgagctgcaagcctcggaggacgccaaactgcggctggaagtcaacatgcaggcgctcaagggccagttcgaaagggatctccaagcccgggacgagcagaatgaggagaagaggaggcaactgcagagacagcttcacgagtatgagacggaactggaagacgagcgaaacgaacgtgccctggcagctgcagcaaagaagaagctggaaggggacctgaaagacctggagcttcaggccgactctgccatcaaggggagggaggaagccatcaagcagctacgcaaactgcaggctcagatgaaggactttcaaagagagctggaagatgcccgtgcctccagagatgagatctttgccacagccaaagagaatgagaagaaagccaagagcttggaagcagacctcatgcagctacaagaggacctcgccgccgctgagagggctcgcaaacaagcggacctcgagaaggaggaactggcagaggagctggccagtagcctgtcgggaaggaacgcactccaggacgagaagcgccgcctggaggcccggatcgcccagctggaggaggagctggaggaggagcagggcaacatggaggccatgagcgaccgggtccgcaaagccacacagcaggccgagcagctcagcaacgagctggccacagagcgcagcacggcccagaagaatgagagtgcccggcagcagctcgagcggcagaacaaggagctccggagcaagctccacgagatggagggggccgtcaagtccaagttcaagtccaccatcgcggcgctggaggccaagattgcacagctggaggagcaggtcgagcaggaggccagagagaaacaggcagccaccaagtcgctgaagcagaaagacaagaagctgaaggaaatcttgctgcaggtggaggacgagcgcaagatggccgagcagtacaaggagcaggcagagaaaggcaatgccagggtcaagcagctcaagaggcagctggaggaggcagaggaggagtcccagcgcatcaacgccaaccgcaggaagctgcagcgggagctggatgaggccacggagagcaacgaggccatgggccgtgaggtgaacgcactcaagagcaagctcagagggccccccccacaggaaacttcgcagtgatgcaccaggcgaggaaacgagacctctttcgttccttctagaaggtctggaggacgtagagttattgaaaatgcagatggttctgaggaggaactggacactcgagacgcagacttcaatggaaccaaggccagtgaataagcaactttctacagttttgcaccacggcaagaaaaccaaaaaccaaaacaaacaaacaaaaaaaacccaacaacaacccgaacaagac

SEQ ID NO: 246 - DNA, 307 bp, Homo sapiens
aaagtttatagaaathmtttattatwagacaaaaatagactctcththhhcccctattcatgtgatcctactctgaatctctgctcagaggaggcagtgactcgctccccacccctctcccatccctgccgtgctggcacctgcagctgggtggaactggcaggggctgatcccctggagggctgacgttctcctgcaggtggggctgcctgayctccttcggggctcaactgctgatgcctcctcacccctcacacacccacctctgacatctgctcacatgcaaggtcatcttgtgggsctgtcc

SEQ ID NO: 247 - DNA, 380 bp, Homo sapiens
  misc_feature (1)...(380): n=a,t,g or c
tttttttttgatggtccattcgctttattgggtgcgtgtagtgttgtcatgacatctcctaaggaactggggggcacgtttgacactcatgaggtcagaacaggtctggtgggcggggggggggggggtcccagggtggtgaatacccacagcacacccccccaccaaaagagaaaacggggagaggagcctggcaggccagactctgatccccatggtccacacagggaaacccccaacagcggcctcggcccaccgcggcanagcagggngntggcaggcctggccacctcccattgcccgatcagcctgttttagggtntcatctggccccttttcacaactnacaactttggatgggggtgaattttaaaaaaagg

SEQ ID NO: 248 - DNA, 3414 bp, Homo sapiens
ggcaggagggagggagccagaggaaaagaagaggaggagaaggaggaggacccggggagggaggcgcggcgcgggaggaggaggggcgcagccgcggagccagtggccccgcttggacgcgctgctctccagatacccccggagctccagccgcgcggatcgcgcgctcccgccgctctgcccctaaacttctgccgtagctccctttcaagccagcgaatttattccttaaaaccagaaactgaacctcggcacgggaaaggagtccgcggaggagcaaaaccacagcagagcaagaagagcttcagagagcagccttcccggagcaccaactccgtgtcgggagtgcagaaaccaacaagtgagagggcgccgcgttcccggggcgcagctgcgggcggcgggagcaggcgcaggaggaggaagcgagcgcccccgagccccgagcccgagtccccgagcctgagccgcaatcgctgcggtactctgctccggattcgtgtgcgcgggctcgccgagcgctgggcaggaggcttcgttttgccctggttgcaagcagcggctgggagcagccggtccctggggaatatgcggcgcgcgtggatcctgctcaccttgggcttggtggcctgcgtgtcggcggagtcgagagcagagctgacatctgataaagacatgtaccttgacaacagctccattgaagaagcttcaggagtgtatcctattgatgacgatgactacgcttctgcgtctggctcgggagctgatgaggatgtagagagtccagagctgacaacaactcgaccacttccaaagatactgttgactagtgctgctccaaaagtggaaaccacgacgctgaatatacagaacaagatacctgctcagacaaagtcacctgaagaaactgataaagagaaagttcacctctctgactcagaaaggaaaatggacccagccgaagaggatacaaatgtgtatactgagaaacactcagacagtctgtttaaacggacagaagtcctagcagctgtcattgctggtggagttattggctttctctttgcaatttttcttatcctgctgttggtgtatcgcatgagaaagaaggatgaaggaagctatgaccttggagaacgcaaaccatccagtgctgcttatcagaaggcacctactaaggagttttatgcgtaaaactccaacttagtgtctctatttatgagatcactgaacttttcaaaataaagcttttgcatagaataatgaagatctttgttttttgttttcattaaaggaccattctggcactttaatgataaaatcccattgtatttaaaacatttcatgtatttctttagaacaacataaaattaaaatttaacatctgcagtgttctgtgaatagcagtggcaaaatattatgttatgaaaaccctcgatgttcatggaattggtttaaacttttatgcgcaaatacaaaatgattgtctttttcctatgactcaaagatgaaagctgtttcatttgtgtcagcatgtctcagattgaccttaccaagttggtcttactttgttaatttatctgttgtccccttcctctcctctgccctcccttcttgtgcccttaaaaccaaaccctatgccttttgtagctgtcatggtgcaatttgtctttggaaaattcagataatggtaatttagtgtatatgtgattttcaaatatgtaaactttaacttccactttgtataaatttttaagtgtcagactatccattttacacttgctttatttttcattacctgtagctttgggcagatttgcaacagcaaattaatgtgtaaaattggattattactacaaaaccgtttagtcatatctatctaatcagatcttcttttgggaggatttgatgtaagttactgacaagcctcagcaaacccaaagatgttaacagtattttaagaagttgctgcagattcctttggccactgtatttgttaatttcttgcaatttgaaggtacgagtagaggtttaaagaaaaatcagtttttgttcttaaaaatgcatttaagttgtaaacgtctttttaagcctttgaagtgcctctgattctatgtaacttgttgcagactggtgttaatgagtatatgtaacagtttaaaaaaaaagttggtattttataagcacagacaattctaatggtaacttttgtagtcttatgaatagacataaattgtaatttgggaacataaaaactactgaataaatcatgtggcctaatattgaaaatgtcactgttataaattttgtacatttttgatcaaatgtacatctcccctttgctaacggccgtctgctctcaggttgacgtgggtttgatttctaagtgtttcacagtgtctgtaaatcaagaccaaagagcctgtcgatgagactgtttattaccagattcacttctgaattggccagaggaaatctgaatgtattatcctgtgtgtgtctaggtagagatattggaaggctgccaggggatttcgaagtttgcaacctttataggataactgatggcaatattaagacagacgcctgcttttgcaaataacttacaagactgtaaattccaaagatctgaatggggctttcctgatgttggtatctaaggcttaggcctatagattgatttacctttggaattgtgctccaaatgtctactgaagcttaaccgaagaactaataaatggactacagtagctcacgttacagggaaccaccctaggcagggaggctctgtgtgttaaaatgagggtctcactgctttaggattgaagtggctggaaagagtgatgcctggggaaggagatggagttatgagggtactgtggctggtactttctgtactaaacatttcctttttctattttaccactaattttcttttaaactgtgagccgtccaagtcagaagaagacagcaaaaaaagcaacttttccaacatacaatttacttttaataaagtatgaatatttcattttgagaacattccctggaattgccacataattcattaaaaacatttttttaagcaacacttggaacagtgtttactttaaatccttaatggccttaattaattctcagattcctgccccatcacttacagaaccaattcactttagagtgactaaaaggaaacgatagcctagctttctaaagccacgctgtgtccctcaattacagagggtaggaatgggtatacctctaactgtgcaaagcagagtgaaattcaattcatagaataacaactgctgggaatatccgtgccaggaaaagaaaaatttctggcaaatattttgtcactgctgtaaagcaaaatatttgtgaaagtgccaaaataaagtctgtcatgccaaaagt

SEQ ID NO: 249 - DNA, 624 bp, Homo sapiens
cgtctgtcccaggggaccggaacacggagcaggaggagggcggtgaggcggtgcacgaggtggaggtggtcatcaagcacaaccggttcacaaaggagacctatgacttcgacatcgccgtgctccggctcaagacccccatcaccttccgcatgaacgtggcgcctgcctgcctccccgagcgtgactgggccgagtccacgctgatgacgcagaagacggggattgtgagcggcttcgggcgcacccacgagaagggccggcagtccaccaggctcaagatgctggaggtgccctacgtggaccgcaacagctgcaagctgtccagcagcttcatcatcacccagaacatgttctgtgccggctacgacaccaagcaggaggatgcctgccagggggacagcgggggcccgcacgtcacccgcttcaaggacacctacttcgtgacaggcatcgtcagctggggagagggctgtgcccgtaaggggaagtacgggatctacaccaaggtcaccgccttcctcaagtggatcgacaggtccatgaaaaccaggggcttgcccaaggccaagagccatgccccggaggtcataacgtcctctccattaaagtgagatcccactc

SEQ ID NO: 250 - DNA, 1955 bp, Homo sapiens
gaattcaccaagcgttggattgttcacccactaatagggaacgtgagctgggtttagaccgtcgtgagacaggttagttttaccctactgatgatgtgttgttgccatggtaatcctgctcagtacgagaggaaccgcaggttcagacatttggtgtatgtgcttggctgaggagccaatggggcgaacgtaccatctgtgggattatgactgaacgcctctaagtcagaatcccgcccaggcgaacgatacggcagcgccgcggagcctcggttggcctcggatagccggtcccccgcctgtccccgccggcgggccgcccccccctccagcgccccgcgcgcgcgggagggcgcgtgccccgccgcgcgccgggaccggggtccggtgcggagtgcccttcgtcctgggaaacggggcgcggccggaaaggcggccgccccctcgcccgtcacgcaccgcacgttcgtggggaacctggcgctaaaccattcgtagacgacctgcttctgggtcggggtttcgtacgtagcagagcagctccctcgctgcgatctattgaaagtcagccctcgacacaagggtttgtccgcgcgcgcggcggcgtgcgtgcggggggcccggcggggcgtgcgcgtccggcgccgtccgtccttccgttcgtcttcctccctcccggcctctccgccgaccgcgggcgtggtgggggggtgggggggggacgcgcgaccccggtcggcgcgccccgcttcttcggttcccgcctcctccccgttcaccgcggggcggctcgtccgctccgggccgggacggggtccggggagcgtggtttgggagccgcggaggcggccgcgccgagccgggcccgtgcgcggtccccgtcccgggggttggccgcgcgggccccggtggggccacccggggtcccggccctcgcgcgtccttcctctcgctcctccgcacgggtcgaccagcagaccgcgggtggtgggcggcgggcggcgaggccgcacgggcgtccccgcacccggccgacctccgctcgtgacctctcctcggtcgggctccggggtcgaccgcctgccccgcgggcgtgagactcagccgctgtctcgccgtgtcccgggtcgaccggcgggcttctccaccgagcggcgtgtaggagtgcccgtcgggacgaaccgcaaccggagcgtccccgtctcggtcggcacctccggggtcgaccagctgccgcccgcgagctccggacttagccggcgcctgcacgtgtcccgggtcgaccagcaggcggccgcgacgtgcggcgcaccgacgagagggcgtgcattcccgttcgcgcgcccggaccctccaccggcctgggcccgacggtggagctgggaccacgcggaactccctctcctacatttttttcagccccaccgcgagtttgcgtccgcgggattttaagagggagtcactgctgccgtcagccagtaatgcttcctccttttttgcttttaggttttgctcttgcctttttttttttttttttctttctttctttctttctttctttctttctttctttctttctttctttctcgctctcgcctctcgctctctccctcgctcgttttctttctctttctctttctctctctctctctctctctctctctctgtctctcgctctcgccctctctctctctctcttctctctgtctctctctgtctctctctctctctctctctctctctctctctctctctctctctctctctccctccccctccctccctctctccccttccttggtgccttctcggctcttgacacttagccgctgtctcgccgtgtcccgggtcgaccggcgggccttctccaccgagcggcgtgtaagagtgcccgtcgggacgagccggacccgccgcgtccccgtctcggtcggcactccggggtcgaccagctg

SEQ ID NO: 251 - DNA, 2350 bp, Homo sapiens
ctggcggagcagaggtgcagaagcaactgagtccaagttgtctggccggcttcaggtggacccagaagacgtccccaactcagggagattcagcgatcactcactcactcgctgtacagaatgatattcctcacggcactgcctctgttctggattatgatttcagcctcccgagggggtcactggggtgcctggatgccctcgtccatctcggccttcgaaggcacgtgcgtctccatcccctgccgctttgacttcccggatgagctgcggcccgctgtggtgcatggtgtctggtacttcaatagcccctaccccaagaactaccccccggtggtcttcaagtcgcgcacccaagtagtccacgagagcttccagggccgcagccgcctcctgggggacctgggcctgcgaaactgcaccctcctgctcagcaacgtcagccccgagctgggcgggaagtactacttccgtggggacctgggcggctacaaccagtacaccttctcagagcacagtgtcctggatatcgtcaacacccccaacatcgtggtgcccccagaggtggtggcaggcacggaggtggaggtcagctgcatggtgccggacaactgcccagagctgcgccctgagctgagctggctgggccacgaggggctgggggagcccgctgtgctgggccggctgcgggaggacgagggcacctgggtgcaggtgtcactgctgcacttcgtgcccacgagggaggccaacggccacaggctgggctgccaggcctccttccccaacaccaccctgcagttcgagggctacgccagcatggacgtcaagtaccccccggtgattgtggagatgaactcctcggtggaggccatcgagggctcccacgtgagcctgctctgtggggctgacagcaaccccccgccgctgctgacctggatgcgggacgggacagtcctccgggaggcggtggccgagagcctgctcctggagctggaggaggtgacccccgccgaagacggcgtctatgcctgcctggccgagaatgcctatggccaggacaaccgcaccgtggggctcagtgtcatgtatgcaccctggaagccaacagtgaacgggacaatggtggccgtagagggggagacggtctctatcttgtgctccacacagagcaacccggaccctattctcaccatcttcaaggagaagcagatcctgtccacggtcatctacgagagcgagctgcagctggagctgcccgccgtgtcacccgaggatgatggagagtactggtgtgtggctgagaaccagtatggccagagggccaccgccttcaacctgtctgtggagttcgcccctgtgctcctcctggagtcccactgcgcggcagcccgagacacggtgcagtgcctgtgcgtggtgaagtccaacccggagccgtccgtggcctttgagctgccatcgcgcaatgtgaccgtgaacgagagcgagcgggagttcgtgtactcggagcgcagcggcctcgtgctcaccagcatcctcacgctgcgggggcaggcccaggccccgccccgcgtcatctgcaccgcgaggaacctctatggcgccaagagcctggagctgcccttccagggagcccatcgactgatgtgggccaagatcgggcctgtgggcgccgtggtcgcctttgccatcctgattgccatcgtctgctacattacccagacacgcaggaaaaagaacgtgacagagagccccagcttctcggcaggggacaaccctcccgtcctgttcagcagcgacttccgcatctctggggcaccagagaagtacgagagcgagaggcgcctgggatctgagaggaggctgctgggccttcggggtgagcccccagagctggacctgagctattctcactcggacctggggaaacggcccaccaaggacagctacacgctgacggaggagctagctgagtatgctgaaatccgggtcaagtgaaggagctgggggcagcctgcgtggctgacccccctcaggaccctcgctggcccccactggctgtgggctcccttcctcccaaaagtatcgggggctgggccaggagggagtgaggcaggtgacagtgaggtcctgggggcctgacctccccctccttcccagctgcccctccctgccagcacccccacgccctcattacggctcctctctaacctcctttaccctcatctgtctggaggggagctctgtctgtccgtgttatttattgctacttcctgcctggtctcctgcccccacacctggccctggggcctgtacaaaagggacatgaaataaatgccccaaagcc

SEQ ID NO: 252 - DNA, 952 bp, Homo sapiens
gcagctgcgctgcgactgctctggaaggagaggacggggcacaaaccctgaccatgaccccccacaggctgctgccaccgctgctgctgctgctagctctgctgctcgctgccagcccaggaggcgccttggcgcggtgcccaggctgcgggcaaggggtgcaggcgggttgtccagggggctgcgtggaggaggaggatggggggtcgccagccgagggctgcgcggaagctgagggctgtctcaggagggaggggcaggagtgcggggtctacacccctaactgcgccccaggactgcagtgccatccgcccaaggacgacgaggcgcctttgcgggcgctgctgctcggccgaggccgctgccttccggcccgcgcgcctgctgttgcagaggagaatcctaaggagagtaaaccccaagcaggcactgcccgcccacaggatgtgaaccgcagagaccaacagaggaatccaggcacctctaccacgccctcccagcccaattctgcgggtgtccaagacactgagatgggcccatgccgtagacatctggactcagtgctgcagcaactccagactgaggtctaccgaggggctcaaacactctacgtgcccaattgtgaccatcgaggcttctaccggaagcggcagtgccgctcctcccaggggcagcgccgaggtccctgctggtgtgtggatcggatgggcaagtccctgccagggtctccagatggcaatggaagctcctcctgccccactgggagtagcggctaaagctgggggatagaggggctgcagggccactggaaggaacatggagctgtcatcactcaacaaaaaaccgaggccctcaatccaccttcaggccccgccccatgggcccctcaccgctggttggaaagagtgttggtgttggctggggtgtcaataaagctgtgcttggggtcaaa

SEQ ID NO: 253 - DNA, 3357 bp, Homo sapiens
ttggctggtgcacctaaataatacatatatcctcctcaaccccatcggtctctctgattcctaaatcatccccaaacatttctggtggcccatatggggattggagataacagatttactgtctcctttgcccatgggactagggccctggggctgtggaagacctggcatccaaggcatgccatgggggagtttcacccggacggagactggctctccccgcatcctgcccagcagtgcaactgaacctgagatggggctgcaggatgacaccagcacttcaggaaccgcgttgcaggtgtcacaccttggattcaccatagctggctgaaactagcagcagcagtgactcccgactatgaccagtggattaaccaacaagaccctgattgccccacccgaatagacctacggcgaatcccaaccaccagtaagaaggacaactgccctgctctgaccacactggaggctggtcagtctacacatggctgaagcttgaagatcttgcaagctcttgctcttagtcacatctggaagctgactagtctacacacagccgaagctaagaggaccactctagataagtaaatgtagataaaatttataagcctagttataattgttctgttgttacattattactgcaaatgctgcaaatgtccatgcccagaggaaggtttgccattcctgtgtgtagtgtaagcatgtttctattacatacactaatgttgttaccatttctgcctatactagaaggggagaaatctctagaaggatgcccacactgtgtacatactacctgggtaaggaataccatagttaaaactctactgtaccatacctacagtacaggaaccaagttaggaacctgcacatacaaccagaccacctattcggtctgtgacccaggaaataatcagctatatgtatgttatgaccctaagctcttaccctatgaattctggtttgaaatacatattaaatcagagggagaaaaagaaggagagttatagctcgaacaaaagaagcccctccctcctgtaaagggcctatttccttgtactttgatgcctgctatgctgcatatgttcacaatcctaaaaaaaaaccagaagccagtctgcaatggtgtaacacaagagaggcttagcaggagcagccctaagcatctgtacaaagaaccacaaatcggatgcccagactgtaacattcagtggtccacactaacacaactccaatatttatattcaggaaggagtgctctgctaagtagtatgttaaccaaaccaaactgtaagacaagaacatgcaatcctttacattttactatcttaaagccagagatacctttctggtctacaggacagacagcactataacgacttgatagactaggagcaggccttggagttccactactaattgtcaaaaagactaaaaggactcaaatgcatccaaccccgcaattctgggtccataatcattctataagcatttggataagccagtgcctgagcttcccccaccaaccaaaaacttatttgctcaactagctgaaaacatagctggcagcttaggaatttcctcatgctatgtacgtggaggaactaatatggggaaccagtggccatgggaggcaaaggaattaatgccacaagataacttcacttcgcttaaccctgccagtgaaccaacagcctcagccagtgtttggttgttaaaaacctccataattggaaagtaccgtatcgccgttgggaaaggctttcacagaggcagtaggagaaataacctgcctaggcaacagtattatgatgagactaaaaacaaaactctatggagaagcacccagaattactcctacttaccagatccaaatcctttatctccattctctaccctaagccacacttggcatcaactagaggttccaaatgcttcgaaagcaccctctggcctatattggatctgtggagcatgggcatattggcaactgccagctaaatggacaggagcatgtgtgtagtaacaatcaagccattcttctttctaattcctctaaagcaaggggaactcttatggtatccagttgatgatgaaaataaaagaagaactagaagagcataatcacaaaaatagacacaaatgtcaaaaaggatgtggacataggagactggaaagataatgaatggcctcctgaaagaataattaaatattattggccagctacctgggtgcaagatgggtcatggggttaccacaccccaatctatatgctcaactgcatcataaggttgcaggcagtctttgaaattataaccaatgaaacatcaagggcactagatttattggcaatacaagcaacacaaatgagaaatgctatatattgaaatagattggcattagattatcacttagcctctgaaggaagagtatgtggaaaatttaatttaaccaactgttgcctagaaattgctaataatggccgggttgtcatggaaatcagagctagaatgcacaagttggcccatgttccaattcagacttggtcctaatggtccctggattctttgtttggaggatggttctcaacctttggaggattcaaaaccctcactggtgggtttttgtttattcttggcatctgcctcatcctcccttaccttttacccctgtttattaggaggattcagtcaactatagaggcagtaataactcaacacactaccgcacagttgatggcattaaccaaatatcagccactgccagtagaagaagctcagctctgtgaagaggtggcaaatagtggtgctttctattaacacctttgttataaaaagcagcaaagggggaaatggaacaggaattaaaagaaattaaagaatgcataagcaaaaactcaattgtatgtagggaaacccaattcctcctgaggaagagaaagaggtggagtcctttaaaaattcactgcctgtttttccgtctgtagctagtgagccttatctctccctttcccaggcattgtgaagaccctgtttctccagctgtgcagctgcatggtcactagacagataaactcaagttgtaaaacatgtttttccttgaaaagtaagaaatgatgtaatacatgtctcaactgaataactgtctttgtttctcacttctgtagtaagcttccccctgcacagatctcccctctcaccccatgaaatgcttaaaaggtaacctgactctttgttcagggctcagtcctttggatgttaatctgactgggctggtgcacctaaataataaatacatcctcctcaaaaaaaaaaaaaaaaaaaaaaaaaaaaaaaaaaaaaaaaaaaaaaaaaa

SEQ ID NO: 254 - DNA, 4466 bp, Homo sapiens
tctagatctctagtctataagaccagaggagacagtggctacacatataaatttcagtgtcttccactgatatccgagtgataagcaacttcctttctaaaattatgaaagtaactaagggtctaaaaaaaatttctagtgcggtagtcttaaaactacaaatagttttgtcatatctcctatgatgactccctcccttcagctgcctggagcccaggggtgggcagtgactttgtgtaggcagcaagcagccggtaacaaaataataattattattgttattattatattataataattgtaacaataacaattattattgaagctcatttacaactaaccatccaaaagacctctttcccctgtgtcttcaatccccaaggcagaggggtagggacagttctatccctcctctgcacttaacccttgaaacacatgcacccctttgtgactttaccctctgcagatggctctgaatgtcttaatgtctgagagaaagggatttagaaagcaaaatataaaaattttaaactagtccttcctaccttcctagaagtggcaagagttaaatgttgagatagactcaagggtaggatgactatttcagtttgcctggaagtgtttcagtttgcctggaagtatctcagttttagtgctcagttttagcaggagtcctgcatttcagagaacccctcaaccctgagcaaaataagatggttggtcaccctatggcttggtttgaccatcatcgctataacctgtatcttacctgcatgcatgacacaacacagtgctttacttccctaaaaatgacatcagccccactaaaatatatgtttagtttccaagccctacctagtcaccttctaccctaggagccaggttctcttttcccacccagacagaggagctgcactcagaaattcctagacatgagttaacactggattccttagccttctactcccatcatctcctgctcagccccagctaccacctaaactaggaagatcaagtctaccagtgacctccgtccatggcacttgctgcccctcctctgtccagctcttaccaatatagctgctggaacctggaggtcaaagtcaaattatcaaaaaaaggaactgagctggtgatgtgcactaacacagcaaatcacaggaaaggggaacccaggtaaattacagccttctgacctaggaagacgtgtggtttgcgtctctgagttacagaaacacaggaaatgcttactggaccagtcaatttcagaattttgggtcccaagctaggctgactcaccttcagaatggaaaccacgtgacagcccttatatcagggcacacatcacatgctcttccagaagtcaatgggtttggaaccctcacagatattgggaaagctcactaatcatttctgccagttatcagaggttgctctgaaactataaggaagattcaaagaaaatgccaagactgatattaaacttggcaggaacccttgttacagaattttcctgcctgacaaggttaaaagaacaataagcaggaaacacagtcctccaggaataatcaattctatttggcccctggtcaccttcactcagactaaattctaaaacatagaatttcaaataagctatttagataaccttgaccattctccacacacaagcccttgcctgaactattaatagtcaaggcaaagggtagttgttattgctgcctttttaaactgaatcatctgagaaattgcttcagacccccaaagaaagattactgttaacaattcaaaaactaaaatatttgatccctgagacagccttttcccccgacccgcccttcagggctcagtccgaccgactgcaaaggctgttgcaagattgcatcactgacctttgcaattttctggccagtttgattccccttctttcccctgccccctccctttctctgcttaaaggcctttggccaatttgcctctccttttccccaagtttgctaaccctttggccaatttgcctctctttttccccaagtttgctaactctagcatatccataaccaaagccaaactagaacgctccctcagccccaggtgattacagctaaccctggtcaaaatcaatcctacatcttcacacgtccaagagtactcacactctggattcttacctaagctgtctactacacgcccttctgcccacaaactgcttcaaagctgaagttgagctggagcagtgaagttgtacccccaaacccaggagggtggcagagaattattgaggagagcatgaaatacttccattctaaaatggcaagatgaacttctaccaacagccccttccatacttgaccccctacccccaagctcccaactccacttctcaagtggaagtgagaacaatttgaatttgaaggctcttccctgatacacggaagtacataaggaaacagctcgcaggcaaagagactaatctctctctctctctctctctctctctctctctctctctcacacacacacacacacacacacacacacacacctctgtgcataaaagcaccatcaatgaatagttttctatcaactgactctagttatacatgcatgtacctctaaataaaaccaaccaggcaggaaagaaacaatattagcacatattgctttatccaagcgtaacctgttctgtcctgttacccagatccttcccccttgccttctcctctctgatccattgccacacacgtgggaaggtgacaacccttccgaataaaaatgaaagctttcttctttagatggaacccccaaattccctcattatttataatgtcaggctgtcctggacaagggaagctgtgcacccgctgacaccagtaagaaggttgccgccatgtcagagatgtccgcggacacctccctgggctccgggtcctcccctgcgctcgcctggagtgggaccttcgcgtgcacactggccttcccacgcgccccgctgcgatggcacccgcgccgggccccctagctcacacagtcggagcgtgctcagcgcgtggccacctcttgccaggtcccagccgggttccaccccctccttttcccctcctcttcttcctccccctccgagttcccctggctctgaccgcgctggcctgggcccgagagcccaggaggcgtgtctcagagaaaagatataagcggcccccggacgctaaagcggtgccagcggcggagtctccaactgggagagctgcagctgccgagaggaggagaacgctgaggtcggtcggaccaacggacgcgctgaccgctgccaactgcagctcgcgctgcctcctgctcgcgccgtgccactaaggtagtccgcctttctatgagccctccccaagattagctgggtgcggggtggtgggagccgttctttggtggctgaagcccctctcctgctgctcctcctgcaggtcattcccgcctccgagagcccagagccgagatggaaacggtccaggagctgatccccctggccaaggagatgatggcccagaagcgcaaggggaagatggtgaagctgtacgtgctgggcagcgtgctggccctcttcggcgtggtgctcggcctgatggagactgtgtgcagccccttcacggccgccagacgtctgcgggaccaggaggcagccgtggcggagctgcaggccgccctggagcgacaggctctccagaagcaagccctgcaggagaaaggcaagcagcaggacacggtcctcggcggccgggccctgtccaaccggcagcacgcctcctaggaactgtgggagaccagcggagtgggagggagacgcagtagacagagacagaccgagagaggaagggagagacagagggggcgcgcgcacaggagcctgactccgctgggagagtgcaggagcacgtgctgttttttatttggacttaacttcagagaaaccgctgacatctagaactgacctaccacaagcagccaccaaaggagtttgggattgagttttgctgctgtgcagcactgcattgtcatgacatttccaacactgtgtgaattatctaaatgcgtctaccattttgcactagggaggaaggataaatgctttttatgttattattattaattattacaatgaccaccattttgcattttgaaataaaaaactttttataccatatctcatgtaattcctgagaggtgtggtgtcctggggtgggaagcagggagggtgagcaggtgggcgatggtgatgggttcttacctgagcactgcagagggagcagcttcctgagggtcagacacttgcttcacacctaggaactgtgtaataagttactacatgcatataagtctgttgaggacttgtttttccttcttgttaggggtgggaagagagaaaattttataacttccgtgagatttagcattttaacatcaaaaggtagatc

SEQ ID NO: 255 - DNA, 586 bp, Homo sapiens
  misc_feature (1)...(586): n=a,t,g or c
ccacttgtttatattttaacagccactgagagatcagtgatgctgtggtgacagcagtcagcattatttcttagagaatacaaatgtattaagttagagtaatttcaggtgtgttaaacaggagatgcttctgaaggccataagtttggagcttactttaacctgacctacatgaacataagatttgtaggatgtggataaactttaagaactggatagtgaaggcgtaacttttgttttgtaaccagttacgcctcttctgtaaactctataagagtgctcaaaggtgaatcaaacttgtatatcattccttgtcaaataggctgttcccactggataagaaaatttgctgtatgttttcctgaaaaattttatagtgttctacaaagccatcaccttctgcagaaaaaaaatgttacttatgctccacctccccagccctcactaaaaactttggtagccctatggcgggtacccnaattaaggtcagtgcagaaatctccaccattacagaagtctcttacnattttggctcncaaaatactcnaactagtagcncggttgcnggatcnagaagtaggtagag

SEQ ID NO: 256 - DNA, 381 bp, Homo sapiens
ctatggcaggtttatgtttttatttatgtattttaactgacttatttgtgtatcccactagaacaatacattcacaatatacttgcagaactgtgcctggcgcatcatgggagcagagaacttgtccagtgaatagttgttgaagaaaggagtaaaatctcccccaaaccctaaaggcatccttttcgtagtgtgtgtcccataggtatggctgctgagcaccagggctgctcaccatgctcccaagaagcagagtcagggaggcagacagcagggtttattaaggtgcacacccatgtctgagccccagctctctccgccttctgtggggagaagccctccggtctttccgagaaccttcaaactctggacagtttatgt

SEQ ID NO: 257 - DNA, 220 bp, Homo sapiens
acggtgggatacgttttattgagaagtgtcatgacgaaggatatctagatcagggaagtctatcaggacagggtgaaagaaggcagtctgcctggcgagctgctcagcccccttccccatcagcctagcccctctttgaaccgtgccagttctagacggcctacaggagcgcgaatgagtgaggaacttggcacagagcacctttctgtagtaatcccca

SEQ ID NO: 258 - DNA, 293 bp, Homo sapiens
  misc_feature (1)...(293): n=a,t,g or c
ttttttttactgtgaaattctaaaatcatatttattcaccaattcacagaaagtgtcataacgaccaccaacatgaatcagtttgtaggcatttacaagccacagctgaaaataaaaatctgtctgtgttgaataggcatttaacaaattacttgaaaactgcaagaatcataattattataaatttaangtttgtgattcaaacatgggtaagatcacagtcatggggagaagcccaacagattcctgtgatgatccttattttcttcctatatctttatatacataggagg

SEQ ID NO: 259 - DNA, 439 bp, Homo sapiens
  misc_feature (1)...(439): n=a,t,g or c
tttttccccnattagtnannatatatatttnccccntaaatgagatgaaatgagtggcgtccnggggtggagggaggcgctggctggagtcggggctgggggtgggagggggtgagggaaaggttggggggggacgcatcactcaacgttgctgctgtcgaaggtntggcactgaaagtccccgtcaacgtactccatgcctggcagcttcatcccgtacttntccacgcaccagcagatgccacgtttgngccacgggaaggtttgcactgctttctcttgtagaatcctttgcggtcacaattgggcaggtacacagcacggggcaccatgcgtgggctggctttgagctcctgcagggaagcctccatgtgtctgcggcaggggccctgctcagattcctgtctcatttgcaggtgcagagangatccggggnttg

SEQ ID NO: 260 - DNA, 277 bp, Homo sapiens
  misc_feature (1)...(277): n=a,t,g or c
ttttttctcagtttctcctttattgctcccgtacgaacccctcccctcccccctgtaaacacagtgctgcgagatcgntggcagagaaggcttcctccagcggctgggtggtgaaggaccctggctcttctctcggggcgacccctcagtgctcggcagtcatactggggtgcgagagaggtgggcagcagntcagcctccccccgntgggatgcgaaagtttnttggtntcagcttcatttccgtgaagggcaccnngaactcgaagcccttccag

SEQ ID NO: 261 - DNA, 448 bp, Homo sapiens
  misc_feature (1)...(448): n=a,t,g or c
catatccatnnatcatattttattagctgtcaataccaccnttccattcatggcctgtgttttaattaaatttcataaactaccagtacaaatcaatacaatgcattttttaacacaccaacagcttgaatgttcttgaagcttttaaacaatgagtttactgtgagcaaacagaagcaaggactcaaagagatanttagctcatgcatctggngctggctaatanttttcacatgantgangaaaccactctatgttaactgtatttntntnnnaaanatagtttganatgggtaataaaatgcaattttcagaagcatcttgggtgntcgaggtaggacctgccttantttangagatanttcaggttacttccccctgggccggggggtgggatancatgtngccaaaancttcccntcccccctaggattctgggccggtgggg

SEQ ID NO: 262 - DNA, 169 bp, Homo sapiens
  misc_feature (1)...(169): n=a,t,g or c
ttcacaaaggtttattgggtccctgcctggtgctggtttgggttagtcactgtagaggatccatctgggccagcctgggaggggcaggtctggagtccnaggcagacacgaaaccgggggtgacaccaggggctttggaggctgccatgctgaggacagctctgggagg

SEQ ID NO: 263 - DNA, 2512 bp, Homo sapiens
caatgcactgacggatatgagtgggatcctgtgagacagcaatgcaaagatattgatgaatgtgacattgtcccagacgcttgtaaaggtggaatgaagtgtgtcaaccactatggaggatacctctgccttccgaaaacagcccagattattgtcaataatgaacagcctcagcaggaaacacaaccagcagaaggaacctcaggggcaaccaccggggttgtagctgccagcagcatggcaaccagtggagtgttgcccgggggtggttttgtggccagtgctgctgcagtcgcaggccctgaaatgcagactggccgaaataactttgtcatccggcggaacccagctgaccctcagcgcattccctccaacccttcccaccgtatccagtgtgcagcaggctacgagcaaagtgaacacaacgtgtgccaagacatagacgagtgcactgcagggacgcacaactgtagagcagaccaagtgtgcatcaatttacggggatcctttgcatgtcagtgccctcctggatatcagaagcgaggggagcagtgcgtagacatagatgaatgtaccatccctccatattgccaccaaagatgcgtgaatacaccaggctcattttattgccagtgcagtcctgggtttcaattggcagcaaacaactatacctgcgtagatataaatgaatgtgatgccagcaatcaatgtgctcagcagtgctacaacattcttggttcattcatctgtcagtgcaatcaaggatatgagctaagcagtgacaggctcaactgtgaagacattgatgaatgcagaacctcaagctacctgtgtcaatatcaatgtgtcaatgaacctgggaaattctcatgtatgtgcccccagggataccaagtggtgagaagtagaacatgtcaagatataaatgagtgtgagaccacaaatgaatgccgggaggatgaaatgtgttggaattatcatggcggcttccgttgttatccacgaaatccttgtcaagatccctacattctaacaccagagaaccgatgtgtttgcccagtctcaaatgccatgtgccgagaactgccccagtcaatagtctacaaatacatgagcatccgatctgataggtctgtgccatcagacatcttccagatacaggccacaactatttatgccaacaccatcaatacttttcggattaaatctggaaatgaaaatggagagttctacctacgacaaacaagtcctgtaagtgcaatgcttgtgctcgtgaagtcattatcaggaccaagagaacatatcgtggacctggagatgctgacagtcagcagtatagggaccttccgcacaagctctgtgttaagattgacaataatagtggggccattttcattttagtcttttctaagagtcaaccacaggcatttaagtcagccaaagaatattgttaccttaaagcactattttatttatagatatatctagtgcatctacatctctatactgtacactcacccataacaaacaattacaccatggtataaagtgggcatttaatatgtaaagattcaaagtttgtctttattactatatgtaaattagacattaatccactaaactggtcttcttcaagagagctaagtatacactatctggtgaaacttggattctttcctataaaagtgggaccaagcaatgatgatcttctgtggtgcttaaggaaacttactagagctccactaacagtctcataaggaggcagccatcataaccattgaatagcatgcaagggtaagaatgagtttttaactgctttgtaagaaaatggaaaaggtcaataaagatatatttctttagaaaatggggatctgccatatttgtgttggtttttattttcatatccagcctaaaggtggttgtttattatatagtaataaatcattgctgtacaacatgctggtttctgtagggtatttttaattttgtcagaaattttagattgtgaatattttgtaaaaaacagtaagcaaaattttccagaattcccaaaatgaaccagataccccctagaaaattatactattgagaaatctatggggaggatatgagaaaataaattccttctaaaccacattggaactgacctgaagaagcaaactcggaaaatataataacatccctgaattcaggcattcacaagatgcagaacaaaatggataaaaggtatttcactggagaagttttaatttctaagtaaaatttaaatcctaacacttcactaatttataactaaaatttctcatcttcgtacttgatgctcacagaggaagaaaatgatgatggtttttattcctggcatccagagtgacagtgaacttaagcaaattaccctcctacccaattctatggaatattttatacgtctccttgtttaaaatctgactgctttactttgatgtatcatatttttaaataaaaataaatattcctttagaagatcactctaaaa

SEQ ID NO: 264 - DNA, 3128 bp, Homo sapiens
ccttgtgcatttggtctgaagacaaagatgactgcaggagtgggcaggccggagtgggggtgacctggcctgtgccaggaaggaggaggagtctgcagccctgtgcggttcaacatccatcaaggagtccagagcaggagccaggccaggcgggagggaaaggccctgggaggggctctctaatctcccagccccgactctgccccgtcactgccgctgctcctcattactcgctggggctgctgtcgcctccccgaagggtggccttgtccagatagtggcaaacctccctgccgtggatgagtcaggagcattttcttaagaggaacatcactggaaaacaaaatgagcggggacacagaaaccaacagcagtggctgcatttgtggtacaggctcctcttccagagctcgctgatgcccacctcagacaggcctgaccacggcacggctggtgggatttgccagtcacctcaaccagccagttccaccctcagcttctctcagaagggagcaccacactcctcaagctcagtgaatgtatcccggcatgggtggggccagagcctgtgatatctcgaggtgggctcggcaggacaccggggtgtggaagggggaagcgagcacctgactcagacagcgcgggagctcgcaggagtcacgaggccacagcgacttcattgtctgactgggcctggacctataaacttcccacctcagccttgggccaagcctggaagataaaaatggagcaccccatggcgcccctcactcagattctcccctgggcttctcccacgcagccccagaagaggacacaccagccccagagttagccccagaggcccctgagcctcctgaagagccccgcctaggagtgctgaccgtgaccgacacaaccccagactccatgcgcctctcgtggagcgtggcccagggcccctttgattccttcgtggtccagtatgaggacacgaacgggcagccccaggccttgctcgtggacggcgaccagagcaagatcctcatctcaggcctggagcccagcaccccctacaggttcctcctctatggcctccatgaagggaagcgcctggggcccctctcagctgagggcaccacagggctggctcctgctggtcagacctcagaggagtcaaggccccgcctgtcccagctgtctgtgactgacgtgaccaccagttcactgaggctcaactgggaggccccaccgggggccttcgactccttcctgctccgctttggggttccatcaccaagcactctggagccgcatccgcgtccactgctgcagcgcgagctgatggtgccggggacgcggcactcggccgtgctccgggacctgcgttccgggactctgtacagcctgacactgtatgggctgcgaggaccccacaaggccgacagcatccagggaaccgcccgcaccctcagcccagttctggagagcccccgtgacctccaattcagtgaaatcagggagacctcagccaaggtcaactggatgcccccaccatcccgggcggacagcttcaaagtctcctaccagctggcggacggaggggagcctcagagtgtgcaggtggatggccaggcccggacccagaaactccaggggctgatcccaggcgctcgctatgaggtgaccgtggtctcggtccgaggctttgaggagagtgagcctctcacaggcttcctcaccacggttcctgacggtcccacacagttgcgtgcactgaacttgaccgagggattcgccgtgctgcactggaagcccccccagaatcctgtggacacctatgacgtccaggtcacagcccctggggccccgcctctgcaggcggagaccccaggcagcgcggtggactaccccctgcatgaccttgtcctccacaccaactacaccgccacagtgcgtggcctgcggggccccaacctcacttccccagccagcatcaccttcaccacagggctagaggcccctcgggacttggaggccaaggaagtgaccccccgcaccgccctgctcacttggactgagcccccagtccggcccgcaggctacctgctcagcttccacacccctggtggacagaaccaggagatcctgctcccaggagggatcacatctcaccagctccttggcctctttgggtccacctcctacaatgcacggctccaggccatgtggggccagagcctcctgccgcccgtgtccacctctttcaccacgggtgggctgcggatccccttccccagggactgcggggaggagatgcagaacggagccggtgcctccaggaccagcaccatcttcctcaacggcaaccgcgagcggcccctgaacgtgttttgcgacatggagactgatgggggcggctggctggtgttccagcgccgcatggatggacagacagacttctggagggactgggaggactatgcccatggttttgggaacatctctggagagttctggctgggcaatgaggccctgcacagcctgacacaggcaggtgactactccatccgcgtggacctgcgggctggggacgaggctgtgttcgcccagtacgactccttccacgtagactcggctgcggagtactaccgcctccacttggagggctaccacggcaccgcaggggactccatgagctaccacagcggcagtgtcttctctgcccgtgatcgggaccccaacagcttgctcatctcctgcgctgtctcctaccgaggggcctggtggtacaggaactgccactacgccaacctcaacgggctctacgggagcacagtggaccatcagggagtgagctggtaccactggaagggcttcgagttctcggtgcccttcacggaaatgaagctgagaccaagaaactttcgctccccagcggggggaggctgagctgctgcccacctctctcgcaccccagtatgactgccgagcactgaggggtcgccccgagagaagagccagggtccttcaccacccagccgctggaggaagccttctctgccagcgatctcgcagcactgtgtttacaggggggaggggaggggttcgtacaggagcaataaaggagaaactgaggtacccgaaaa

SEQ ID NO: 265 - DNA, 1654 bp, Homo sapiens
acgagggtccggctgagccccgggatccgcctccctccgccaggacccgcacagataaactcatcctgaaagtcgctgttgttctcctgctgagcaagaatggaggccccactggtgagtctggatgaagagtttgaggaccttcgaccctcctgctcggaggacccggaggagaagccccagtgtttctatggttcatctccccaccatctcgaggacccctccctctccgagcttgagaatttttcttccgaaataatcagcttcaagtccatggaggacctcgtaaatgaatttgatgagaagctcaatgtctgctttcggaactacaacgccaagaccgagaacctagctcccgtgaagaaccagttacagatccaagaggaggaggagacccttcaggacgaggaggtttgggatgctctgacagacaattacatcccttcactctcagaagactggagggatccaaacatcgaggctctgaatggcaactgctctgacactgagatccatgagaaagaagaggaagagttcaatgagaagagtgaaaatgattccggtatcaacgaggagcctctgctcacagcagatcaggtaattgaggagattgaggaaatgatgcagaactccccagaccctgaggaagaagaggaggttctggaagaagaggatggaggagaaacttcctcccaggcagactcggtcctcctgcaggagatgcaggcattgacacagaccttcaacaacaactggtcctatgaagggctgaggcacatgtctgggtctgagctgaccgagctgctggaccaggtggagggtgccatccgtgacttctcggaggagctggtgcagcagctggcccgccgggacgagctggagtttgagaaggaagtgaagaactcctttatcacggtgcttattgaggttcagaacaagcagaaggagcagcgagaactgatgaaaaagaggcggaaagagaaagggctgagcctgcagagcagccggatagagaagggaaaccagatgcctctcaagcgcttcagcatggaaggcatctccaacattctgcagagtggcatccgccagacctttggctcctcaggaactgacaaacagtatctgaacacagtcattccttacgagaagaaagcctctcctccctcagtggaagacctgcagatgctgacaaacattctctttgccatgaaggaggataatgagaaggtgcctactttgctaacggactacattttaaaagtgctctgccctacctaaccttgccctttggagcagcctcgctgcaggaggtcactgagcaagagtcattccatcacagggactgcatgagaccatgtaacctccgacatgtatttaaacgtgtatagcttaacctggattaaacacgagcaagcgcgcggggtcctttgccgttggcttctagtgctagtaatcattggatgcatgatggggcagggccggtgatggtgcctcccccttgctggtgtcaggagaggggaaggcagccgctttcaccgctcattatgtagtctggctacagccctccaaaacagcttatactcttaagactaattttgaaataaaaccttcatttaattaaaaaaaaaaaaaaaaaaaaaaaaaaaaaattaaa

SEQ ID NO: 266 - DNA, 1198 bp, Homo sapiens
cctttatgtctagcacatttgatgaaataaaaaacttctgaatctgaatagaagttctactgtttcaggcttgaaccttttacatgctcaagagattcaaatggtctctgtgtgtagatcatgccaccgcctccaaagcctaatccacatcacttctgagaggcaaggctgagcatatggtgacatcagctctgtgttgagatggtgatgaggatgatggctcgctggccaggcagggcagccgaaggtcagggacctgtcctaactaactgcagccttgcctttagtgtttgtcattctcagatacaacacggtatgtccagtgtccgtttttattactttaaagcatttgagggcttaattgtgtatagtagaaatactattttagacaaataattatctgtgtacagatatttgatatactctaagtaaattttctaatttcactaagtacgtttttaggctcctctcaaatactgcgtattgaagaaaaaaatctgacaccaccgagccaaagatgcttttttgtctgttttcgttgtttaacagaatggaaagagtaatgcatagtgcttcctggtgtctcctgattgattgattgtgcacaaagtaggacgataaataaataaaatggagtctgatgggacattgattaaaggtgaaggatgattgatatatagatcatgaaaagaaaaatgaatggcaggaaaaaaagtttggtccttaatatactttggcctagttaaaatatgtgcctttttggtgtgttttgttcatcactacaagataaaaaggaaacattacaactcaagtctttaaaaagttcatttattgaaaatcatatgtataacctagcatacgaatgagcagatttaaacacataacttcaagccatttctgaaaacatacaccaggagctctgctcagctagagtcagactccagctccagcccgactgcgtgcggggacagcgcccgcgttgatgaggaccagccccactgcaggctgaggcggtgtcaccctgggaaggtcgtggtgcgttgtggcatattaagtctaaaccagatgaatgtaaatatctctttgtaaatcatttatttcactctgttccatccaggtcagcaatcagattgtggcatgctgggtaactggaaaaaataataaaaagtaagtttcaataaaaaaaaaaaaaaaaaaa

SEQ ID NO: 267 - DNA, 1418 bp, Homo sapiens
gtcagtccctggcccggagccaggctctctgtgctacttacatctccctcccttggctgaggtcccccgccacagcctggacccttccctcagaagcctggccgatgggtgcttttggggagcctctcagcctctggcaggggaggaggactgacacggaggcacacaggcctctcactgccgaggccagccttccttcctgctctgctctctcagtgccatggagaggcaggaagaggggcctgagggcggaaggggtttggggctcccatttcgccggccagtccctcctcctcagcctggcagtggcgctgggctccttcccctgggctgtactgagccgagcccaggggtttgcagagggtgggggtccatctctccagcttggctgcagacctcctttaccctgactcacaagccccactgatgctctgggccatgcccggctgacggctgctgtggatgccgcgagggacggacacacgtccggggcacccacgaggagggcccccagcctgggagactggccctgcggcctccacgtcaaactctcttcccaaagccctaacagaccagtggccgaggtgtggctcttattgcatccatccctgaagatgtgtggctgttgctgtcacctggagtccttttggggccaagatgtgtgtgcacccggggtcgtggccattcactcccaggcaggggtgagggtggcctggcccaggaggccaggaaggagggccctgtctgcctccacctctgggtgcaccccctgcctaccaccctcccttctagagagcacatcgcctgaccggggagaagtggggccgtggttcgagggagggctggccaggggtgggacccttatgagactcagtctgtgagtaaaactgggggctcaaatgcccaggatgaggggatcagtgactgtctaggaggatcccttgccttgtaggtgccccaagaccgcagggtagaaatcagccgggatgcctgcatcccacccccggccccagggcccaccacataaaatctgggagcccagagctgctgaggtgtggtcagctcccctaaaatgggcacggcccagcctgtcccatgaggaataaaggcccctggcccccttgagagagggcttgttggtgagggctgactcctgggggcccccaaggctcccctcctgtggggaggccaccttttaaggcaccactagcagtcaggatatggtggcatcagccctggggcctcctgggtggcaggggggcagcagctctcctccccactcacaggccctgcagtgctcatttggaattcctcccaagacccctggccacccagaccccccattcttcctaacactggcaataaaccctcaactgtgacccacaaaaaaaaaaaaaaaaaaaaaaaaaaaaaaaaaa

SEQ ID NO: 268 - DNA, 642 bp, Homo sapiens
  misc_feature (1)...(642): n=a,t,g or c
ctattacaagtttagaantnacaaagcaattgtcaaaaaaagttagaactattacaacccctgtttcctggtacttatcaaatacttagtatcatgggggttgggaaatgaaaagtaggagaaaagtgagattttactaagacctgttttactttacctcactaacaatggggggagaaaggagtacaaataggatctttgaccagcactgtttatggctgctgtggtttcagagaatgtttatacattatttctaccgagaattaaaacttcagattgttcaacatgagagaaaggctcagcaaccgtgaaataaccgcaaatggcttcctctttccttttttnggaccatctcagtctttatttgtgtaattcattttgaggaaaaaacaactccatgtatttattcaagtgcattaaagtctacaatggaaaaaaagcagtgaagcattagatgctggtaaaagctagaggagacacaatgagcttagtacctccaacttcctttccttcctaccatgtaaccctgctttgggaatatggatgtaaagaagtaacttgtgtctcatgaaaatcngtaccatcncacaaggaggatgaacgccggaacaaaatggggtgtgtagacagggtccncaggtt

SEQ ID NO: 269 - DNA, 438 bp, Homo sapiens
ttgaaacatcattttttatttcttctgagtatctacattcaattgctttagtaaattaacaaaaaacatgcaaatacatgtggtttctggtgacaagttctctaagacagtgtgggaaatgacctaaatatgcacgggcaaggctcagtctccagaggagtcgggcaggggtaggtaggggctgtctgatccccagggcaatgaagttcttagagctgaagcccagctcctcctttttaagaggaaatgacgagccaaagccttctgcgtttgttagagatcctagcttgtggccctgtcagaaccagaatccaggtatcccaattccctgtccactgcccccagcctgaagcccttcatccttcctcttagcaccctctcagggggaacaggggccctaggtatgtttacaaaagtccagaatgggtcagtatttgg

SEQ ID NO: 270 - DNA, 457 bp, Homo sapiens
gctgcgcggacgtctttatttttcctgggtggggagcaggatacacagccacactgcagtcacttagcttgtaaaaatatctcaataaataaaacaaacaagcaacatatacactgaacagagaatattttttttaaaatggctagccaagcaatcacggagaaaggaaaagaatagcggcgtgaaagtaagaattccaggctgacttgaaacaatcatgcagaggctcgggggaggggaaggaactcgggggtcctcttctgagagccttggtccagtttcaacagaattgtacaagaatgcatttctgttttattaaaaaaatagacattaaaaaaggcacttagagggaaatacaaattcaaaatccaaatcctcataaatgtgttcctggaatctagacattttcagaaagaataaacctccccccaaacataagacccagaagaaaaatcca

SEQ ID NO: 271 - DNA, 424 bp, Homo sapiens
  misc_feature (1)...(424): n=a,t,g or c
agagctctagcacatttattcgggagagtaagcctgggaaagactaagggagtggtggcagggagaaaggctgtggggaatcagagcgggtgctcagttgggtcttgaagganannnnnnngnnggtgggaggtgggttnccgaggatatcttggttgaagacttgggggtcaagacaaagggacttagggggatggggtctggttagagttggggagggggcctaggacatccgtgcagagtctggggaggttggggtgggagagtctgtacaagtttggtgttgggtgttctagttggcctggtgtccaagagttggggcagtccgaaaaagggttccagagtctggtgtggctggctggggtttcacggcanaaaatgggctggaaggggcagttgtaaactgtctggttgcaaggnaaag

SEQ ID NO: 272 - DNA, 445 bp, Homo sapiens
gaacgttaatatttttatttcttttgtaatgaagagtacaaatggttgggagcaggacatcacaggaggaggaaagatagcgccatctctgcagaagaactcctgagccacacacagaaggaaagttgatccccagggcagcctttcccaccaaaaaaatcaggcccaatccaggagagtttgccagtagctccccagggttccagggtgtctgccagccttcctaggaatcgtgggcaggcttctaggtgccagtgactcaaactccttttcccacttcccagttcaacctggtcactctcatccccacaagttcccaatctgaatcccattctctgaccattctctgcttccttgtttttaatctcatttgagagtgatcctcacgggttcccctggcccctgcactcattttccttactgggtatgctaacgttcctcgtgc

SEQ ID NO: 273 - DNA, 446 bp, Homo sapiens
ttttaaaaaaaaactacatctctttattgcagaatttatacttgtttgaaaaatacaaaatgtagcgttgataagattgaagcatgttgaaaggtaagtacagggaaaggtcctttcagaatgactgcaacagtgcagcaaggattcccattccccgcctaaaggacaatacctttttaatagaaataaatgagttagttagttagatttttattacagattgaattaaacagttagttacaaagacattctctgatacattcattcatagaggtcttaacgtataaatacatagtaaatatcctataaaatcggtaggcaatctcatcgtgcattatctttttgtgctcagacttggacttcacattcagtctctacatacagcttgattagaatcataaaaacaatatgaagacgattgcataaaggggatagtttgaccaaag

SEQ ID NO: 274 - DNA, 189 bp, Homo sapiens
aagaaaaataactttgttattaatcatatacaatcataacaaaagtacatcatagtatcacatccataattgcttgaatgctaacttgactgttacatggacctgttacaaataatgaacaacagagctactccagtatatgactagtcactgtgaaataaaaacagacccatggcacacatggaaatt

SEQ ID NO: 275 - DNA, 431 bp, Homo sapiens
atagtaagaacccaattttatttagaaaccagcaagcagcgtatgcagttaagaacccaattttattacaatttgtacataaatgcccaggaaaagttggaaggtgctacattaaggtgttaagagtcgccatgggggtggctgatgtgagaatttaaggtgttttctctttaggataaaatatcctaccgcccccaggagtgaccacgtgaggctgcataatggccgtctctgtgtctgcagtgatgtctgcagtgacgaacgcccggggtggtgagctctaatggccttctctgtgtctgcagtgatgtctgcagtgacgaacgcccggggtggtgagctctaatggccgtctctgtgtctgcagtgatgtctgcagtgacgaacgcccggggtggtgagctctcgactttagagagagaattgcatcc

SEQ ID NO: 276 - DNA, 2532 bp, Homo sapiens
agtgcactcaagcagagaagaaatccacaaagactcaccagtctgctggtgggcagagaagacagaaacgacatgagcacagcaggaaaagtaatcaaatgcaaagcagctgtgctatgggaggtaaagaaacccttttccattgaggatgtggaggttgcacctcctaaggcttatgaagttcgcattaagatggtggctgtaggaatctgtcgcacagatgaccacgtggttagtggcaacctggtgaccccccttcctgtgattttaggccatgaggcagccggcatcgtggagagtgttggagaaggggtgactacagtcaaaccaggtgataaagtcatcccgctctttactcctcagtgtggaaaatgcagagtttgtaaaaacccggagagcaactactgcttgaaaaatgatctaggcaatcctcgggggaccctgcaggatggcaccaggaggttcacctgcagggggaagcccattcaccacttccttggcaccagcaccttctcccagtacacggtggtggatgagaatgcagtggccaaaattgatgcagcctcgcccctggagaaagtctgcctcattggctgtggattctcgactggttatgggtctgcagttaacgttgccaaggtcaccccaggctctacctgtgctgtgtttggcctgggaggggtcggcctatctgctgttatgggctgtaaagcagctggagcagccagaatcattgcggtggacatcaacaaggacaaatttgcaaaggccaaagagttgggtgccactgaatgcatcaaccctcaagactacaagaaacccatccaggaagtgctaaaggaaatgactgatggaggtgtggatttttcgtttgaagtcatcggtcggcttgacaccatgatggcttccctgttatgttgtcatgaggcatgtggcacaagcgtcatcgtaggggtacctcctgcttcccagaacctctcaataaaccctatgctgctactgactggacgcacctggaagggggctgtttatggtggctttaagagtaaagaaggtatcccaaaacttgtggctgattttatggctaagaagttttcactggatgcgttaataacccatgttttaccttttgaaaaaataaatgaaggatttgacctgcttcactctgggaaaagtatccgtaccgtcctgacgttttgaggcaatagagatgccttcccctgtagcagtcttcagcctcctctaccctacgagatctggagcaacagctaggaaatatcattaattcagctcttcagagatgttatcaataaattacacatgggggctttccaaagaaatggaaattgatgggaaattatttttcaggaaaatttaaaattcaagtcagaagtaaataaagtgttgaacatcagctggggaattgaagccaacaaaccttccttcttaaccattctactgtgtcacctttgccattgaggaaaaatattcctgtgacttcttgcatttttggtatcttcataatctttagtcatcgaatcccagtggaggggacccttttacttgccctgaacatacacatgctgggccattgtgattgaagtcttctaactctgtctcagttttcactgtcgacattttcctttttctaataaaaatgtaccaaatccctggggtaaaagctagggtaaggtaaaggatagactcacatttacaagtagtgaaggtccaagagttctaaatacaggaaatttcttaggaactcaaataaaatgcccacattttactacagtaaatggcagtgtttttatgacttttatactatttctttatggtcgatatacaattgattttttaaaataatagcagatttcttgcttcatatgacaaagcctcaattactaattgtaaaaactgaactattcccagaatcatgttcaaaaaatctgtaattttgctgatgaaagtgcttcattgactaaacagtattagtttgtggctataaatgattatttaggatgatgactgaaaatgtgtataagtaattaaaagtaatatggtggctttaagtgtagagatgggatggcaaatgctgtgaatgcagaatgtaaaattggtaactaagaaatggcacaaacaccttaagcaatatattttcctagtagatatatatatacacatacatatatacacatatacaaatgtatatttttgcaaaattgttttcaatctagaacttttctattaactaccatgtcttaaaatcaagtctataatcctagcattagtttaatattttgaatatgtaaagacctgtgttaatgctttgttaatgcttttcccactctcatttgttaatgctttcccactctcaggggaaggatttgcattttgagctttatctctaaatgtgacatgcaaagattattcctggtaaaggaggtagctgtctccaaaaatgctattgttgcaatatctacattctatttcatattatgaaagaccttagacataaagtaaaatagtttatca

SEQ ID NO: 277 - DNA, 5084 bp, Homo sapiens
gatcccatcgcagctaccgcgatgagaggcgctcgcggcgcctgggattttctctgcgttctgctcctactgcttcgcgtccagacaggctcttctcaaccatctgtgagtccaggggaaccgtctccaccatccatccatccaggaaaatcagacttaatagtccgcgtgggcgacgagattaggctgttatgcactgatccgggctttgtcaaatggacttttgagatcctggatgaaacgaatgagaataagcagaatgaatggatcacggaaaaggcagaagccaccaacaccggcaaatacacgtgcaccaacaaacacggcttaagcaattccatttatgtgtttgttagagatcctgccaagcttttccttgttgaccgctccttgtatgggaaagaagacaacgacacgctggtccgctgtcctctcacagacccagaagtgaccaattattccctcaaggggtgccaggggaagcctcttcccaaggacttgaggtttattcctgaccccaaggcgggcatcatgatcaaaagtgtgaaacgcgcctaccatcggctctgtctgcattgttctgtggaccaggagggcaagtcagtgctgtcggaaaaattcatcctgaaagtgaggccagccttcaaagctgtgcctgttgtgtctgtgtccaaagcaagctatcttcttagggaaggggaagaattcacagtgacgtgcacaataaaagatgtgtctagttctgtgtactcaacgtggaaaagagaaaacagtcagactaaactacaggagaaatataatagctggcatcacggtgacttcaattatgaacgtcaggcaacgttgactatcagttcagcgagagttaatgattctggagtgttcatgtgttatgccaataatacttttggatcagcaaatgtcacaacaaccttggaagtagtagataaaggattcattaatatcttccccatgataaacactacagtatttgtaaacgatggagaaaatgtagatttgattgttgaatatgaagcattccccaaacctgaacaccagcagtggatctatatgaacagaaccttcactgataaatgggaagattatcccaagtctgagaatgaaagtaatatcagatacgtaagtgaacttcatctaacgagattaaaaggcaccgaaggaggcacttacacattcctagtgtccaattctgacgtcaatgctgccatagcatttaatgtttatgtgaatacaaaaccagaaatcctgacttacgacaggctcgtgaatggcatgctccaatgtgtggcagcaggattcccagagcccacaatagattggtatttttgtccaggaactgagcagagatgctctgcttctgtactgccagtggatgtgcagacactaaactcatctgggccaccgtttggaaagctagtggttcagagttctatagattctagtgcattcaagcacaatggcacggttgaatgtaaggcttacaacgatgtgggcaagacttctgcctattttaactttgcatttaaaggtaacaacaaagagcaaatccatccccacaccctgttcactcctttgctgattggtttcgtaatcgtagctggcatgatgtgcattattgtgatgattctgacctacaaatatttacagaaacccatgtatgaagtacagtggaaggttgttgaggagataaatggaaacaattatgtttacatagacccaacacaacttccttatgatcacaaatgggagtttcccagaaacaggctgagttttgggaaaaccctgggtgctggagctttcgggaaggttgttgaggcaactgcttatggcttaattaagtcagatgcggccatgactgtcgctgtaaagatgctcaagccgagtgcccatttgacagaacgggaagccctcatgtctgaactcaaagtcctgagttaccttggtaatcacatgaatattgtgaatctacttggagcctgcaccattggagggcccaccctggtcattacagaatattgttgctatggtgatcttttgaattttttgagaagaaaacgtgattcatttatttgttcaaagcaggaagatcatgcagaagctgcactttataagaatcttctgcattcaaaggagtcttcctgcagcgatagtactaatgagtacatggacatgaaacctggagtttcttatgttgtcccaaccaaggccgacaaaaggagatctgtgagaataggctcatacatagaaagagatgtgactcccgccatcatggaggatgacgagttggccctagacttagaagacttgctgagcttttcttaccaggtggcaaagggcatggctttcctcgcctccaagaattgtattcacagagacttggcagccagaaatatcctccttactcatggtcggatcacaaagatttgtgattttggtctagccagagacatcaagaatgattctaattatgtggttaaaggaaacgctcgactacctgtgaagtggatggcacctgaaagcattttcaactgtgtatacacgtttgaaagtgacgtctggtcctatgggatttttctttgggagctgttctctttaggaagcagcccctatcctggaatgccggtcgattctaagttctacaagatgatcaaggaaggcttccggatgctcagccctgaacacgcacctgctgaaatgtatgacataatgaagacttgctgggatgcagatcccctaaaaagaccaacattcaagcaaattgttcagctaattgagaagcagatttcagagagcaccaatcatatttactccaacttagcaaactgcagccccaaccgacagaagcccgtggtagaccattctgtgcggatcaattctgtcggcagcaccgcttcctcctcccagcctctgcttgtgcacgacgatgtctgagcagaatcagtgtttgggtcacccctccaggaatgatctcttcttttggcttccatgatggttattttcttttctttcaacttgcatccaactccaggatagtgggcaccccactgcaatcctgtctttctgagcacactttagtggccgatgatttttgtcatcagccaccatcctattgcaaaggttccaactgtatatattcccaatagcaacgtagcttctaccatgaacagaaaacattctgatttggaaaaagagagggaggtatggactgggggccagagtcctttccaaggcttctccaattctgcccaaaaatatggttgatagtttacctgaataaatggtagtaatcacagttggccttcagaaccatccatagtagtatgatgatacaagattagaagctgaaaacctaagtcctttatgtggaaaacagaacatcattagaacaaaggacagagtatgaacacctgggcttaagaaatctagtatttcatgctgggaatgagacataggccatgaaaaaaatgatccccaagtgtgaacaaaagatgctcttctgtggaccactgcatgagcttttatactaccgacctggtttttaaatagagtttgctattagagcattgaattggagagaaggcctccctagccagcacttgtatatacgcatctataaattgtccgtgttcatacatttgaggggaaaacaccataaggtttcgtttctgtatacaaccctggcattatgtccactgtgtatagaagtagattaagagccatataagtttgaaggaaacagttaataccattttttaaggaaacaatataaccacaaagcacagtttgaacaaaatctcctcttttagctgatgaacttattctgtagattctgtggaacaagcctatcagcttcagaatggcattgtactcaatggatttgatgctgtttgacaaagttactgattcactgcatggctcccacaggagtgggaaaacactgccatcttagtttggattcttatgtagcaggaaataaagtataggtttagcctccttcgcaggcatgtcctggacaccgggccagtatctatatatgtgtatgtacgtttgtatgtgtgtagacaaatatttggaggggtatttttgccctgagtccaagagggtcctttagtacctgaaaagtaacttggctttcattattagtactgctcttgtttcttttcacatagctgtctagagtagcttaccagaagcttccatagtggtgcagaggaagtggaaggcatcagtccctatgtatttgcagttcacctgcacttaaggcactctgttatttagactcatcttactgtacctgttccttagaccttccataatgctactgtctcactgaaacatttaaattttaccctttagactgtagcctggatattattcttgtagtttacctctttaaaaacaaaacaaaacaaaacaaaaaactccccttcctcactgcccaatataaaaggcaaatgtgtacatggcagagtttgtgtgttgtcttgaaagattcaggtatgttgcctttatggtttcccccttctacatttcttagactacatttagagaactgtggccgttatctggaagtaaccatttgcactggagttctatgctctcgcacctttccaaagttaacagattttggggttgtgttgtcacccaagagattgttgtttgccatactttgtctgaaaaattcctttgtgtttctattgacttcaatgatagtaagaaaagtggttgttagttatagatgtctaggtacttcaggggcacttcattgagagttttgtcttgccatactttgtctgaaaaattcctttgtgtttctattgacttcaatgatagtaagaaaagtggttgttagttatagatgtctaggtacttcaggggcacttcattgagagttttgtcaatgtcttttgaatattcccaagcccatgagtccttgaaaatattttttatatatacagtaactttatgtgtaaatacataagcggcgtaagtttaaaggatgttggtgttccacgtgttttattcctgtatgttgtccaattgttgacagttctgaagaattc

SEQ ID NO: 278 - DNA, 2033 bp, Homo sapiens
ggagaatccccggaaaggctgagtctccagctcaaggtcaaaacgtccaaggccgaaagccctccagtttcccctggacgccttgctcctgcttctgctacgaccttctggggaaaacgaatttctcattttcttcttaaattgccattttcgctttaggagatgaatgttttcctttggctgttttggcaatgactctgaattaaagcgatgctaacgcctcttttccccctaattgttaaaagctatggactgcaggaagatggcccgcttctcttacagtgtgatttggatcatggccatttctaaagtctttgaactgggattagttgccgggctgggccatcaggaatttgctcgtccatctcggggatacctggccttcagagatgacagcatttggccccaggaggagcctgcaattcggcctcggtcttcccagcgtgtgccgcccatggggatacagcacagtaaggagctaaacagaacctgctgcctgaatgggggaacctgcatgctggggtccttttgtgcctgccctccctccttctacggacggaactgtgagcacgatgtgcgcaaagagaactgtgggtctgtgccccatgacacctggctgcccaagaagtgttccctgtgtaaatgctggcacggtcagctccgctgctttcctcaggcatttctacccggctgtgatggccttgtgatggatgagcacctcgtggcttccaggactccagaactaccaccgtctgcacgtactaccacttttatgctagttggcatctgcctttctatacaaagctactattaatcgacattgacctatttccagaaatacaattttagatatcatgcaaatttcatgaccagtaaaggctgctgctacaatgtcctaactgaaagatgatcatttgtagttgccttaaaataatgaatacaatttccaaaatggtctctaacatttccttacagaactacttcttacttctttgccctgccctctcccaaaaaactacttcttttttcaaaagaaagtcagccatatctccattgtgcctaagtccagtgtttctttttttttttttttttgagacggagtctcactctgtcacccaggctggactgcaatgacgcgatcttggttcactgcaacctccgcatccggggttcaagccattctcctgcctaagcctcccaagtaactgggattacaggcatgtgtcaccatgcccagctaatttttttgtattttagtagagatgggggtttcaccatattggccagtctggtctcgaactctgaccttgtgatccatcgatcagcctctcgagtgctgagattacacacgtgagcaactgtgcaaggcctggtgtttcttgatacatgtaattctaccaaggtcttcttaatatgttcttttaaatgattgaattatatgttcagattattggagactaattctaatgtggaccttagaatacagttttgagtagagttgatcaaaatcaattaaaatagtctctttaaaaggaaagaaaacatctttaaggggaggaaccagagtgctgaaggaatggaagtccatctgcgtgtgtgcagggagactgggtaggaaagaggaagcaaatagaagagagaggttgaaaaacaaaatgggttacttgattggtgattaggtggtggtagagaagcaagtaaaaaggctaaatggaagggcaagtttccatcatctatagaaagctatataagacaagaactcccctttttttcccaaaggcattataaaaagaatgaagcctccttagaaaaaaaattatacctcaatgtccccaacaagattgcttaataaattgtgtttcctccaagctattcaattcttttaactgttgtagaagacaaaatgttcacaatatatttagttgtaaaccaagtgatcaaactacatattgtaaagcccatttttaaaatacattgtatatatgtgtatgcacagtaaaaatggaaactatattgacctaaaaaaaaaaaaa

SEQ ID NO: 279 - DNA, 3881 bp, Homo sapiens
gctgaagtgttcgaccagcaggaggttttctcctcagcccactcgctgcatccagatcagctcaccccgcgccctttcctgcccaccaggactctgatagcccctggcagccacagcccattttgccaagatgtctagagtagccaaatatcgccggcagtgagtgaagaccccgacatcgacagcctgctgggaccctgtctcccgaggagatggaggagctggagaaggagctggacgtggtggacccagacgggagtgttcccgtggggctgcggcagagaaaccagacggagaaacagtccacgggtgtgtacaaccgggaggccatgctcaacttctgtgaaaaggagaccaagaaacttatgcagagggagatgtccatggatgaaagcaagcaagtggagaccaagacagatgccaagaatggacaggaaaggggcagagatgccagcaaaaaagccctgggccccagacggaactcagatctggggaaggagccaaagaggggtggtttaaagaaaagcttctctagagacagagatgaagctggtggcaagagtggcgagaagcccaaggaggagaagatcatccggggcattgacaagggccgggtcagggctgcagtggataagaaggaggcagggaaggatgggagaggagaggagagggcagtggccaccaagaaggaagaggagaagaaagggggtgacaggaacacaggcttgagcagggacaaggataaaaagagagaggagatgaaggaggtggccaagaaagaggatgatgagaaggtaaaaggggagcgtaggaacacagacaccagaaaagagggtgagaagatgaaaagagcaggtgggaacacagacatgaaaaaggaggatgagaaggtaaaaagaggaactgggaacacagacaccaaaaaggacgatgaaaaagtcaagaagaatgaacccttacatgaaaaggaagccaaggatgacagcaagaccaaaacacccgagaaacagacgcccagtggccccaccaagccctctgaaggaccggccaaggtggaggaggaggcagctcccagcatatttgatgagcctctggagagagtgaagaacaatgaccccgagatgactgaggtgaacgtcaacaactcagactgcatcacaaatgagatcttggtccggtttactgaggctctggagttcaacactgtggttaagctgttcgccttggccaacacgcgagccgatgaccacgtggcctttgccattgccatcatgctcaaggccaacaagaccatcaccagcctcaacctggactccaaccacatcacaggcaaaggcatcctggccatcttccgggccctcctccagaacaacacgctgaccgagctccgcttccacaaccagcgacacatctgtggaggcaagacggagatggagatcgccaagctgctgaaggagaatacctccctgctcaagctgggctaccattttgagctggccgggccccgaatgactgtcaccaatctgctcagccgcaacatggacaagcagagacaaaagcggctgcaggagcaaaggcaggcacaggaagccaagggagagaagaaggatctgctggaggtacccaaggccggggccgtggctaagggctccccaaaaccttcacctcaaccatctccaaagccctctccaaagaactcacccaaaaaagggggtgctccagctgccccaccaccccctccccctcccttggctccaccccttatcatggagaacctgaagaattcactctcaccagctacccagaggaagatgggagacaaagtcctccctgcccaggagaagaactcccgtgaccagctattggctgccatccgctccagcaacctcaagcagctcaagaaggtggaagtgcccaaactgcttcagtaggaccaggctgccaggcaccatctgccaatgccatgactgctcaggcctcacctcccagggctacacagaccctgcccaccccatccctggctgacctgctgtggatgtccctattctgccatgggagcgtccaggcctgggtcacgctcaaggaaggatgccttatctcttctcactttccttttcttgtctctgaggctctccaaattttgctttagtacatggagctcaggtttctggacaagaagagtccttttagcacatcactgagaagatggcactgtccagggcccatgtagctggcaagctgcaaaaggcctgtgatccaggaaagatgtcccacagggaccacatccaccccagccccactgccctccagggccaggattcaggcctctgaggagcccacggggcaaagctgctgggccagtggcactctgtgtgggaaaatggcagaaagatggagaggcatgggggcccaaaggggagcgtggggaggggctgaggataccccaaagtccaggctaattagaggatgtggcaggggcagtggcctggatgcacagtgcctgatgggagtaggctccagacaggaggagtgggacagacagcagctggacttgaaggtttgatgccaaagcagacattttcctcacacccacctgctgctgtatgaatagctgtgtatctgtttttccataagattttgataatatatacaaacctttagctgtgaatggctgtgccccacctgttgtcctgaactgtgagtcctgatcctaaccctgggctccctggaggactctagaagctcaggttccctgccacactatttgagttggccaagaaataaattcacatcctcagaaagtgcagcatggaggaaaatctgaactctaagcagaagactctccactgacctggttgtccaggtctagaaggccaggcctctactaggtctgctcctgaaccagtcctgctgcctggagtcagtagccagagttgttctcaggggtgctggggcagagtggagcccagggtgctgggatggctatattaggcatgttcagggatgctcattccatgactctgcctaaccatgggctcagggccaggtcctcacagcagtcacaggcccaggaaggcggcaggcagagaagtggagtgactatttggagaatagcacccatatctgtgtgccctagggctcagaggggcctcatcttccccagccctccccacctgctcaccaattccacttcctgccccaactgcaggaatgctgacaatgctgccatgcccaccatcgggtgtaggtgaaaggcatctttctgaatttcattctcttgaaggtgctgccaccccttggcactgtggaactgccaccttgggtctgtgtcacttgtaggtttctctgcctccaggttgcctcaacagcaggaggcacagcagtttcaccatctttgaggtgagggtggggtgccccagctaggaagcaagatcgctgtgctaggtctgaccaaaaccagagggcagtctagtcctgggggtaaagccctcagatcccagggtacactcttctccattccctccacccacttgcctgtcaccccagtcacctaagcaatcactgggcccagaggagaggagacagacacacactggctcctggacctaaagggtatgagctggagctaaggccagctagagcttccactgtcagccctcactgtcagccccactgcacccccctgtgcctgctgggcactgggcactagctagatgctttaggttgcttcagctgatccttcaactctgtgaggtggataccaatattctattttgcagatagaatttggcccagagaggttaactaatatatccatgatcacacagctaataaaagtcagagctcaggaaaaaaaaaaaaaaaaaaaaaaaaaaaaaaaa

SEQ ID NO: 280 - DNA, 362 bp, Homo sapiens
  misc_feature (1)...(362): n=a,t,g or c
gtggtcatctgtcactttattttgcccgtcttgtagcatgtgggtctttcgcagcaggaagtgtgttttacaaccagagcccccgccctcctgcagcgcaggcgcanctggctgggctcctgcttcccactctccacctcatccatatttgtcctcngtccctgccagtctcgaaaaggcactctgtcacgtgtacacaggaaagggccctnacaagaggatgggactgcaagttgtggctgccaggtctcactctcccttggatgggtcggcgggggttgggggtggaaggccagggggctgtaagttgcaaggttccccggcaaggttggctggggcttcaaggggggggaggcaagggc

SEQ ID NO: 281 - DNA, 498 bp, Homo sapiens
  misc_feature (1)...(498): n=a,t,g or c
ttcagttcaatacagcacacctttattgagcacctaaggatctangctgccanaggagggcagagtcgacaaaacagtgggcaggcctcccctgcagctctctgtgtctgtgatgatggagctgggttggggaaatcctgctgtgacatttgccctgacgcagttccgcacagcatggtggcttccaagctatgctcttgatgggcacccgtaagagcttctacatgcattagagatggagcctctcctatctttgcaagcctttgtggttcttccctttaaatctgccatccacggacctcaacaggagaataatttggtcttcagtttgctctgttttagacaaatacttcacatggactggatgtaaactgttgcatagtttcgcaaaggctttctcattcattcctgaaattctccatcagtcacaaacacaaattgttcagtatctggggaattcaaagccctttcctcaaaacagacatttctcctcgtgcc

SEQ ID NO: 282 - DNA, 244 bp, Homo sapiens
caggggaggcggcgacaaagaacgcagcctctaacattatatattaaaatagccacagttcttgtgcacacaattccatcctctcacccctgcctcccccgccaggcccaggaacagccttaaaagaaagatggtggttttccttttcgagaggcgaggaaacatccgctcagtctttatggaccttgagaaatggtgaggcttcccctccccccgtctctgcctcccggccgggcgtgcaaat

SEQ ID NO: 283 - DNA, 433 bp, Homo sapiens
  misc_feature (1)...(433): n=a,t,g or c
gacagcagtgcccaagctggcatccgtcagnacntgtgggcctttgtgttttgatgctacacatgtctatggagggccacttcttctgtaagtctgtggggcctcagcatacccaataggcagcaagtttcagtatttcccagttgtatgtcctcatggtggggctatgtctcccccaccacttcccctctcatcaggctagactttaacatccatcaatcatgtcttgagtcttgctccttcctcttggcttagtcatgtgactacagatcagatgcgtggccntagtgttttaggtgtgcaggtaccatggccccaaatgctgttgtatctgactgaggaaaatgccnctgtcctcnggcgtcccnagggnccgtaggtgnnagctgaatnggcatatgtcttccactctgttcagtgtnnaacactgcca

SEQ ID NO: 284 - DNA, 370 bp, Homo sapiens
  misc_feature (1)...(370): n=a,t,g or c
ttcagtaggtaacaaaatgatctattgtttcaattccttctgatcaagtgactttattccataaaacagtacatcagctgggcaggttcggtctcctcctggatgtatgaccagtcattatttatttgttcctgtaaacatactagggatacagtgacactggtcataactaaatttgaagtaaattagtactgtgacctccaagggcaggtgtgaagcatgttatcagcgcctgaaacaccttgtagtggtttcactaacataagttaaaacataagcacttaggaagaaaagtcttccctcattaaatttctggcatangtgcagctacatgttcatcctgggaacttaaaagtaccttcctccttag

SEQ ID NO: 285 - DNA, 475 bp, Homo sapiens
atcggcagcactgaagctttccattctttattttcatcaggttcaaaatcaatttccaaacagtctcctacatttttcccactgccatggggtcctgggcgtccgggcccccaatattcacgcactcgcaccacgcactcatattccctcaccccaccatcacggccccaaagaaggtcttccctctcgcgaagtccaccatatcggggtgactgatgttgacgtacaccctctcgcccctccggagctgcaccaggccgccgaaccccacgctcgtgtaccagagaggcccgtacccttgtctcctggccgggtccagcactggagtcaccgtctcggcgccctcgagcagcagctcgggagtgcccggcccgtagcgccccccgtggtgacaaagacagtttggctgggggaatcctgggggccagcacccccctccattggccacacctgctgctgccagggcagtggagta

SEQ ID NO: 286 - DNA, 318 bp, Homo sapiens
  misc_feature (1)...(318): n=a,t,g or c
tagattgtaagcaaaagaaatcaaggtcaagatctggaagcaagaagaaaatgctaacattacctcatggtgctgacgaggtttacattctccgatgcaggttttgtggcctagtctttcgaggacccttgtctgttcaggaagactggattaagcacttacaacgacatattgtaaacgctaatcttccacggactggagctggcatggtggaagtcacgtcactacttaaaaagcctgcctccattacagaaacttcattttctctacttaatggccgaagcagctttcataggaaccagggnaccttttaaatag

SEQ ID NO: 287 - DNA, 229 bp, Homo sapiens
tttagcttgcaattcttattacatctttattatcagtcaaggtcacagtcatattaaaaatatataatttaattctcaaataatgtctttgttcctctttttcctaaagtcctttgtcaaaagaagtcaaagttgaatatattttgtagctgatatacatatgctgacagacagcacaatgttctgaaatgaaaacagagatattattgctttataaaaagaaacttgg

SEQ ID NO: 288 - DNA, 415 bp, Homo sapiens
aagtaaaatgtttgctcaactttattgaatgtcattagatttataggaatcattaaagaattagataccagagtccccccggcccagacccccacaaaaaaagtcagtgaaaaagatgtgagtgaaagaagtttgtcaaggcaaatgtgtgaaaggatacatgtgtacatcaccctttaaatgctttccctgagtattctatgaagtctggggatcttcgaatgctattaatcttagacagtaaattttataaagaaattctttaaaagtaggacttaattctcctccgtagtgagtttttaagcagaggatatctactacatggattcctttgcctcttgacaggctcaagttccatctgcctcccaggcagctttttgagtctttcatagaagcctgcttttaatatatgcca

SEQ ID NO: 289 - DNA, 448 bp, Homo sapiens
ttttttagcacttgaacttctgactttattatttttcttcaaatgaacaggtgataaaacactgtgtccaaagcaaaatgcatgactcccttttctcttctttcacagagtaccagaaaatgtaaacaatatttagcttgaacttctgagtcctcatcttttttttaacagcctttagaacaacattaatttgtttgtttatactagcattttacaacataaaaaataaaataagcagactgtctgaggggtttatataaggttttcagattctgatacaggcttgcatctgcatcgtttttagtctgacaaagagaaacactgctttaggaagtgggtcatgtgggtgtataagtggttcgtggacaggccggataagccgtggttctggtcagagtaccacattgcctggaaatccacttgtgcattaaccagagctttagcaatc

SEQ ID NO: 290 - DNA, 409 bp, Homo sapiens
ttttttttaggtaaaacaggatgtaaagtttatatacaagaatataatgtttatctgaaatatttacagtgttggttaaagcaatatttttacaacttttaaaggtaaactactatgtatattacaggtaagctacaatgggtttaatttgcaaaagttaagtaagaaatgttttaaacaaggcttaaagtactcaagtcaattataaaatttatatcttttgccttttacttgaagaaatcatgctatagaaatggttaatgtgcttctaataaatggaagtattgtagctggaatgtgatacatgtaacagtttaagttcccattgaaggtataaaatgatgaattgttgtaagacttagacactgagtctcagtctggagctgatgaagatgttgagataacagcc

SEQ ID NO: 291 - DNA, 221 bp, Homo sapiens
tatacaatttataatctcttaaaggaagcaataaacatttaaactattggactactgggatgtacattttaccagataccagcatcataatcttataactctatatgaaagtttgaaaaaataattataaagtttatttaaatgttgattgtcccaaggtctacagtttcttttctgatgtgtcatcagtgacaaagagtaaaaaaaggaaactcccatat

SEQ ID NO: 292 - DNA, 2691 bp, Homo sapiens
ggagacagacagacagctggcaagaggcagcctgggggccacagctgcttcagcagacctcatggctgagtgagcctcccctgggcccagcaccccacctcagcatggtccaagcccatggggggcgctccagagcacagccgttgaccttgtctttgggggcagccatgacccagcctccgcctgaaaaaacgccagccaagaagcatgtgcgactgcaggagaggcggggctccaatgtggctctgatgctggacgttcggtccctgggggccgtagaacccatctgctctgtgaacacaccccgggaggtcaccctacactttctgcgcactgctggacacccccttacccgctgggcccttcagcgccagccacccagccccaagcaactggaagaagaattcttgaagatcccttcaaactttgtcagccccgaagacctggacatccctggccacgcctccaaggaccgatacaagaccatcttgccaaatccccagagccgtgtctgtctaggccgggcacagagccaggaggacggagattacatcaatgccaactacatccgaggctatgacgggaaggagaaggtctacattgccacccagggccccatgcccaacactgtgtcggacttctgggagatggtgtggcaagaggaagtgtccctcattgtcatgctcactcagctccgagagggcaaggagaaatgtgtccactactggcccacagaagaggaaacctatggacccttccagatccgcatccaggacatgaaagagtgcccagaatacactgtgcggcagctcaccatccagtaccaggaagagcgccggtcagtaaagcacatcctcttttcggcctggccagaccatcagacaccagaatcagctgggcccctgctgcgcctagtggcagaggtggaggagagcccggagacagccgcccaccccgggcctatcgtagtccactgcagtgcagggattggccggacgggctgcttcatcgccacgcgaattggctgtcaacagctgaaagcccgaggagaagtggacattctgggtattgtgtgccaactgcggctagacagaggggggatgatccagacggacgagcagtaccagttcctgcaccacactttggccctgtatgcaggccagctgcctgaggaacccagcccctgacccctgccaccctccggtggcccaggtgcctacctccctcaagcctgggaagtcacaggaagcagcagcagtaaggacaaggggccggattccaggtcttcaacactggccactcctctgcttcctctgttggccccagatggacagtaaggggaacctccaatgtctctctgaacttaaagacaggagctggcatttatgacagacaaagaaagaagcccaggtgtcctggtgttctctgagacactctttgtgagcttcagtttcctgttctataacatgaacataagtgcttagctgccatgagggaaaagtaatgagagaagtttctagaagccactccagccactccttcctggggctgacaaaagggtgattccaagatcatccttcacccgaggtcctgcccaagcacaggccagatgcaagaatggggaaaagtctggtcctgatctccaagtctcaacatcctatcagtgactctgctccctgaccacacatcggaagggctggatgaccccaatcaaaagaaagaacaaggactctggttacccttgccctccacccatgtgtcataagagtaggctacagaggtgaccaggcctggcagttgaaatctctggaagagggaacatgtggggactactcagaggcaaagaggagctgctcctgcctccatggttgctggccactcccaccaactactcttagggaggctaagcagtctctgttttgcttccatggctcaaataataccctgggtatgcaggacccactataccttgcatttgctggtacacctagagagcttggctgtttccaaaaacaatcagggtcataaccatccatgcagacatggaggctcggctgaaccaggactcctcactgtctacctgagagaatgagcacccctcatccatctcagcatcaacacaatttccaggggacctcaggtctacctcaggactgaacgccacacctcaggattcctcctccttgaatctgagactggctgcccattctgagatggggatgaaggtaagatgccgcatcaccaggcacgccgcccctgacagctgccttgataccagctctctgtggaaacccccgaggagttggatctggagaacagctgggcctcctcactcaggacttctctcctgaagaacacgcagtgctaaaactgaggatgatttccctaatgcttctgcttggccttatggaggagctgctccttccttacagccttggggatggacttgcccacacctccacctcccctgagccctgtgagaggcacgactgtctatgccaatgaggctcggtggggggctctcaagtgcctgatcctgccctgggctcagagccagcccagagggaagcaactgcacagccccacaggccctccctggcactgtccccccaaccccatctcagagctcagagggtacaagctccagaacagtaaccaagtgggaaaataaagacttcttggatgactgac

SEQ ID NO: 293 - DNA, 458 bp, Homo sapiens
tccagtgtgtgtgtagcctccacagagaggtcgttttctcggagtccagaggggccgcctgagcttctgagaactagggaggagccatcccagccatgagcccctgtgggaatctgctgggggccaagtggcctggagtcctcaggctcccgcagctgctccggagggagaggtgagctcagggcagcctgcctgcagccagaggtgccgggagccccgggcctgtcatggtggccatctacagccggcctgaggcagtcacagacggatttgcagctgagcctgtctatctggtgtgggaagaagatggggagttacttgtcagtcccggcttacttcacctccagagacctgtttcggtgttcagaatgccaggattccctcaccaactggtactatgagaaggatgggaagctctactgccccaaggactactgggggaagtttggggagttctg

SEQ ID NO: 294 - DNA, 493 bp, Homo sapiens
  misc_feature (1)...(493): n=a,t,g or c
acggtatttttgtttgtaagttaaaaagaaaaaaaaaaagaaaaagttccgggcattttgcatcagaaaacaactttgtcttggggcacacttggaagttgcatgttttctttccttcccttatccccattcggtcctctttttcctctctcgctttagttttcaaccttgttggtgctgagagagagaaccgagaggtcccagtacaagggcagggcagggcagggaagctgccaagctccgcaccccagaggagtgttctggactacagccttgtcttatggtcaaattgatacccttaataagaaaggaaaggaaagggaaaacagatcctcccctctgcttttttatttgttaaccagaatcaccctggagggtcccttctggaacccttggggcctgcggttaattgttgggagccacagcggttcctagggggtgaggagggtttagccatccctgnaccctgggnagttgcattggtaaggnaggc

SEQ ID NO: 295 - DNA, 393 bp, Homo sapiens
  misc_feature (1)...(393): n=a,t,g or c
tttaccagaaaataaagccattttattatgatttttttctctgccatgtggtgggaatngnaggtgagtggatgggtgtgaatggctgaccctgctggaggccctgcgggntcatacttggcctggactgtctcctccagcctgtccaagcgcttctggagctcctgcaccgtggcctggagcttccgcatctcctantccanncgagacacggcatccgagctgggagtgccactggctctggtgctgccctcctgcgcccggtgtccaggccccggttgaccctcagctcccggctctttgggggtacgtagccatccttgagggagatgaggaggggcccagcatcccgaccccccagccactcctcagccgttaggcaagggtcgggcc

SEQ ID NO: 296 - DNA, 1427 bp, Homo sapiens
gtctgggcgccagcccccgccctgggcccgccgcccgcgctctctggcgcagcgctagctccgccgcgctcagctgccctgcgccggcacccctggtcatgagcgccccctcgacgctgccccccgggggcgaggaagggctggggacggcctggccctctgcagccaatgccagtagcgctccggcggaggcggaggaggcggtggcggggcccggggacgcgcgggcggcgggcatggtcgctatccagtgcatctacgcgctggtgtgcctggtggggctggtgggcaacgccctggtcatcttcgtgatccttcgctacgccaagatgaagacggctaccaacatctacctgctcaacctggccgtagccgacgagctcttcatgctgagcgtgcccttcgtggcctcgtcggccgccctgcgccactggcccttcggctccgtgctgtgccgcgcggtgctcagcgtcgacggcctcaacatgttcaccagcgtcttctgtctcaccgtgctcagcgtggaccgctacgtggccgtggtgcaccctctgcgcgcggcgacctaccggcggcccagcgtggccaagctcatcaacctgggcgtgtggctggcatccctgttggtcactctccccatcgccatcttcgcagacaccagaccggctcgcggcggccaggccgtggcctgcaacctgcagtggccacacccggcctggtcggcagtcttcgtggtctacactttcctgctgggcttcctgctgcccgtgctggccattggcctgtgctacctgctcatcgtgggcaagatgcgcgccgtggccctgcgcgctggctggcagcagcgcaggcgctcggagaagaaaatcaccaggctggtgctgatggtcgtggtcgtctttgtgctctgctggatgcctttctacgtggtgcagctgctgaacctcgtcgtgaccagccttgatgccaccgtcaaccacgtgtcccttatcctcagctatgccaacagctgcgccaaccctattctctatggcttcctctccgacaacttccgccgatccttccagcgggttctctgcctgcgctgctgcctcctggaaggtgctggaggtgctgaggaggagcccctggactactatgccactgctctcaagagcaaaggtggggcagggtgcatgtgccccccactcccctgccagcaggaagccctgcaaccagaacccggccgcaagcgcatccccctcaccaggaccaccaccttctgaggagcccttcccctacccaccctgcgtggccacctcccaaggggtgggcaccattcctacagccccgaagactgcatctcctgaatgctcacctaagctccaccacctgttccttccagcagcccatgtacctgccggagagtgtcagaactcttctgctgc

SEQ ID NO: 297 - DNA, 1092 bp, Homo sapiens
gaattcggcacgagtggaaacgcagagcgccggggcagaggagggctttacccaggtcacccgcaagggtggccgacgggcgaagaaacgacaggctgaacagctgtccgcagcaggagagggcggggatgcgggccgcatggacacagaggaggccaggccggcgaagaggcccgtcttcccacccctctgtggggacgggctcctgagtgggaaagaagaaacaaggaaaattccagtcccagctaacagatacacaccattgaaagaaaactggatgaagatatttactcctattgtggaacatttgggacttcagatacgctttaacttggaaatcaaggaatgtgaaatcaggacttgtaagaaccaaggatgttagtgctctgacaaaagcagtgatttgtgaaagcttttattctcggctttcaggtggaggatgcacttgccctcatcaggttggatgacctcttcctagagtcttttgaaattacagatgttaaacccctaaagggagaccatctatccagggcaataggaagaatcgctggcaaaggaggaaaaaccaaattcaccatagagaatgtgacacggacaaggatagttttggctgatgtgaaagttcacatccttggctccttccaaaatatcaagatggcaagaactgccatttgcaacctaatcttgggaaatcctccttccaaggtttatggcaatattcgagctgtggctagcagatcagcagatcgattctgatttcaagtcagagactttttatcttgcctttggactctggtgaaaaatactttacagtggtcggtcacaagaaaccatctgaacaatttcagtcatttgaagctccgtcccttcttccattctcagccagaagcataaacagaaaagaaagatttagaggattcacactcaacaggttttaggatatttatatcaaaaattgattgttatcttacacattaggtataatttatcatttatctgaaatcacatgtagcagattgcatagtcttgtaatcctctcagagggaaacttcttgtctaaacagctctatatggatttatcctccatattcc

SEQ ID NO: 298 - DNA, 2088 bp, Homo sapiens
  misc_feature (1)...(2086): n=a,t,g or c
gtatactcattaccaaaaataacaatatctgcatttcattgttttaactttgttttctttcttttcttttagtgttcctctgaacaacagggagaatatctctgatcccacctcaccattgagaaccagatttgtgtaccatttgtctgacctgtaagatatatttttttccatagtaatatagatgtggaagttaatagcttttaattttaaccttgttagtaagaatgtttttaaaaatatgttggagtataaacatttacaaacataatctgaacttttgaatacattaattcctatgttaattattaggtatcataaattcataaaactttgtcacagataaaatttagctatacattttttctaaagaaaaaatcattggcattcatagaaaggccaatttctcttaatagttcaataagtgnatttgatcttataaaaaggcaggtgtttctttggaaatgacagactccaacatcaatttttttaaaaattctccctttcttgtcactataaataacttgtttagacagatatacagttgggaataagcctaacacagtagaaattgctgtatggtgtagataaaacaatcatattatcatatcattaattatattgcttactttcaactaatatatattaaagattggaaaatcccataagctattctgtattgtagagctgcttatgtctgaaaggagtcatcccttgctgtcatgtcagagctgcaagaactaattgattttggattgaaatgtgtagtcacattttgagacagcatttgaggggattgtctaatacatatatttgcttttcagctgtaaaaaatgtgatcctacagaagtggagctggataatcagatagttactgctacccagagcaatatctgtgatgaagacagtgctacagagacctgctacacttatgacagaaacaagtgctacacagctgtggtcccactcgtatatggtggtgagaccaaaatggtggaaacagccttaaccccagatgcctgctatcctgactaatttaagtcattgctgactgcatagctctttttcttgagaggctctccattttgattcagaaagttagcatatttattaccaatgaatttgaaaccagggcttttttttttttttgggtgatgtaaaaccaactccctgccaccaaaataattaaaatagtcacattgttatctttattaggtaatcacttcttaattatatgttcatactaagtatcaaaatcttccaattatcatgctcacctgaaagaggtatgctctcttaggaatacagtttctagcattaaacaaataaacaaggggagaaaataaaactcaaggagtgaaaatcaggaggtgtaataaaatgttcctcgcattcccccccgcttttttttttttttttgactttgccttggagagccagagcttccgcattttctttactattctttttaaaaaaagtttcactgtgtagagaacatatatgcataaacataggtcaattatatgtctccattagaaaaataataattggaaaacatgttctagaactagttacaaaaataatttaaggtgaaatctctaatatttataaaagtagcaaaataaatgcataattaaaatatatttggacataacagacttggaagcagatgatacagacttctttttttcataatcaggttagtgtaagaaattgccatttgaaacaatccattttgtaactgaaccttatgaaatatatgtatttcatggtacgtattctctagcacagtctgagcaattaaatagattcataagcatatacctgtgtgaaataaattgttggaaaaaagtttccttatgttaactttctttacgtaagttaacttgttattgatgaatggtttgtaagtatgatgtaatgaagcattaatcacagaactaatacatgtacatatttgaggtggctttgccattttatacccataattaaataaaagggcaaaatcccccctgataaataccatgtttatcatggcacataaaactttatggcagtttccaaggccaattgacatatatatttaaa

SEQ ID NO: 299 - DNA, 1522 bp, Homo sapiens
aaaagaggaaaccaacccctaagatgagctttccatgtaaatttgtagccagcttccttctgattttcaatgtttcttccaaaggtgcagtctccaaagagattacgaatgccttggaaacctggggtgccttgggtcaggacatcaacttggacattcctagttttcaaatgagtgatgatattgacgatataaaatgggaaaaaacttcagacaagaaaaagattgcacaattcagaaaagagaaagagactttcaaggaaaaagatacatataagctatttaaaaatggaactctgaaaattaagcatctgaagaccgatgatcaggatatctataaggtatcaatatatgatacaaaaggaaaaaatgtgttggaaaaaatatttgatttgaagattcaagagagggtctcaaaaccaaagatctcctggacttgtatcaacacaaccctgacctgtgaggtaatgaatggaactgaccccgaattaaacctgtatcaagatgggaaacatctaaaactttctcagagggtcatcacacacaagtggaccaccagcctgagtgcaaaattcaagtgcacagcagggaacaaagtcagcaaggaatccagtgtcgagcctgtcagctgtccagagaaaggtctggacatctatctcatcattggcatatgtggaggaggcagcctcttgatggtctttgtggcactgctcgttttctatatcaccaaaaggaaaaaacagaggagtcggagaaatgatgaggagctggagacaagagcccacagagtagctactgaagaaaggggccggaagccccaccaaattccagcttcaacccctcagaatccagcaacttcccaacatcctcctccaccacctggtcatcgttcccaggcacctagtcatcgtcccccgcctcctggacaccgtgttcagcaccagcctcagaagaggcctcctgctccgtcgggcacacaagttcaccagcagaaaggcccgcccctccccagacctcgagttcagccaaaacctcccatggggcagcagaaaactcattgtccccttcctctaattaaaaaagatagaaactgtctttttcaataaaaagcactgtggatttctgccctcctgatgtgcatatccgtacttccatgaggtgttttctgtgtgcagaacattgtcacctcctgaggctgtgggccacagccacctctgcatcttcgaactcagccatgtggtcaacatctggagtttttggtctcctcagagagctccatcacaccagtaaggagaagcaatataagtgtgattgcaagaagtgtagaggaccgagccagaaatcttagagatttcttgtcccctctcaggtcatgtgtagatgcgataaatcaagtgattggtgtgcctgggtctcactacaagcagcctatctgcttaagagactctggagtttcttatgtgccctggtggacacttgcccaccatcctgtgagtaaaagtgaaataaaagctttgactag

SEQ ID NO: 300 - DNA, 2354 bp, Homo sapiens
gggaggaccccaatctaggcccaagagggaaaggccacgtgcctgtatgagcgtatgagcatgtgcatgcgcgtgtgtgcacagggtggtgcacctggcaggggtccttgagtgaggcatgccccattctgtagcagggaacctggaatgggctgtgtgttctgcaagaaattggagccggtggccacggccaaggaggatgctggcctggaaggggacttcagaagctacggggcagcagaccactatgggcctgaccccactaaggcccggcctgcatcctcatttgcccacatccccaactacagcaacttctcctctcaggccatcaaccctggcttccttgatagtggcaccatcaggggtgtgtcagggattggggtgaccctgttcattgccctgtatgactatgaggctcgaactgaggatgacctcaccttcaccaagggcgagaagttccacatcctgaacaatactgaaggtgactggtgggaggctcggtctctcagctccggaaaaactggctgcattcccagcaactacgtggcccctgttgactcaatccaagctgaagagtggtactttggaaagattgggagaaaggatgcagagaggcagctgctttcaccaggcaacccccagggggcctttctcattcgggaaagcgagaccaccaaaggtgcctactccctgtccatccgggactgggatcagaccagaggcgatcatgtgaagcattacaagatccgcaaactggacatgggcggctactacatcaccacacgggttcagttcaactcggtgcaggagctggtgcagcactacatggaggtgaatgacgggctgtgcaacctgctcatcgcgccctgcaccatcatgaagccgcagacgctgggcctggccaaggacgcctgggagatcagccgcagctccatcacgctggagcgccggctgggcaccggctgcttcggggatgtgtggctgggcacgtggaacggcagcactaaggtggcggtgaagacgctgaagccgggcaccatgtccccgaaggccttcctggaggaggcgcaggtcatgaagctgctgcggcacgacaagctggtgcagctgtacgccgtggtgtcggaggagcccatctacatcgtgaccgagttcatgtgtcacggcagcttgctggattttctcaagaacccagagggccaggatttgaggctgccccaattggtggacatggcagcccaggtagctgagggcatggcctacatggaacgcatgaactacattcaccgcgacctgagggcagccaacatcctggttggggagcggctggcgtgcaagatcgcagactttggcttggcgcgtctcatcaaggacgatgagtacaacccctgccaaggttccaagttccccatcaagtggacagccccagaagctgccctctttggcagattcaccatcaagtcagacgtgtggtcctttgggatcctgctcactgagctcatcaccaagggccgaatcccctacccaggcatgaataaacgggaagtgttggaacaggtggagcagggctaccacatgccgtgccctccaggctgcccagcatccctgtacgaggccatggaacagacctggcgtctggacccggaggagaggcctaccttcgagtacctgcagtccttcctggaggactacttcacctccgctgaaccacagtaccagcccggggatcagacatagcctgtccgggcatcaaccctctctggcggtggccaccagtccttgccaatccccagagctgttcttccaaagcccccaggctggcttagaaccccatagagtcctagcatcaccgaggacgtggctgctctgacaccacctagggcaacctacttgttttacagatggggcaaaaggaggcccagagctgatctctcatccgctctggccccaagcactatttcttccttttccacttaggcccctacatgcctgtagccctttctcactccatccccacccaaaagtgctcagaccttgtctagttatttataaactgtatgtacctccctcacttctctcctatcactgctttcctactctccttttatctcactctagtccaggtgccaagaatttcccttctaccctctattctcttgtgtctgtaagttacaaagtcaggaaaagtcttggctggacccctttcctgctgggtggatgcagtggtccaggactggggtctgggcccaggtttgagggagaagtttgcagagcacttcccacctctctgaatagtgtgtatgtgttgatttattgattctgtaaataagtaaaatgacaatatgaatcctcca

SEQ ID NO: 301 - DNA, 4034 bp, Homo sapiens
gcagccagagctcagcagggccctggagagatggccacggtcccagcaccggggaggactggagagcgcgcgctgccaccgccccatgtctcagccagggcttccttcctcggctccaccctgtggatgtaatggcggcccctgctctgtcctggcgtctgcccctcctcatcctcctcctgcccctggctacctcttgggcatctgcagcggtgaatggcacttcccagttcacatgcttctacaactcgagagccaacatctcctgtgtctggagccaagatggggctctgcaggacacttcctgccaagtccatgcctggccggacagacggcggtggaaccaaacctgtgagctgctccccgtgagtcaagcatcctgggcctgcaacctgatcctcggagccccagattctcagaaactgaccacagttgacatcgtcaccctgagggtgctgtgccgtgagggggtgcgatggagggtgatggccatccaggacttcaagccctttgagaaccttcgcctgatggcccccatctccctccaagttgtccacgtggagacccacagatgcaacataagctgggaaatctcccaagcctcccactactttgaaagacacctggagttcgaggcccggacgctgtccccaggccacacctgggaggaggcccccctgctgactctcaagcagaagcaggaatggatctgcctggagacgctcaccccagacacccagtatgagtttcaggtgcgggtcaagcctctgcaaggcgagttcacgacctggagcccctggagccagcccctggccttcaggacaaagcctgcagcccttgggaaggacaccattccgtggctcggccacctcctcgtgggcctcagcggggcttttggcttcatcatcttagtgtacttgctgatcaactgcaggaacaccgggccatggctgaagaaggtcctgaagtgtaacaccccagacccctcgaagttcttttcccagctgagctcagagcatggaggagacgtccagaagtggctctcttcgcccttcccctcatcgtccttcagccctggcggcctggcacctgagatctcgccactagaagtgctggagagggacaaggtgacgcagctgctcctgcagcaggacaaggtgcctgagcccgcatccttaagcagcaaccactcgctgaccagctgcttcaccaaccagggttacttcttcttccacctcccggatgccttggagatagaggcctgccaggtgtactttacttacgacccctactcagaggaagaccctgatgagggtgtggccggggcacccacagggtcttccccccaacccctgcagcctctgtcaggggaggacgacgcctactgcaccttcccctccagggatgacctgctgctcttctcccccagtctcctcggtggccccagccccccaagcactgcccctgggggcagtggggccggtgaagagaggatgcccccttctttgcaagaaagagtccccagagactgggacccccagcccctggggcctcccaccccaggagtcccagacctggtggattttcagccaccccctgagctggtgctgcgagaggctggggaggaggtccctgacgctggccccagggagggagtcagtttcccctggtccaggcctcctgggcagggggagttcagggcccttaatgctcgcctgcccctgaacactgatgcctacttgtccctccaagaactccagggtcaggacccaactcacttggtgtagacagatggccagggtgggaggcaggcagctgcctgctctgcgccgagcctcagaaggaccctgttgagggtcctcagtccactgctgaggacactcagtgtccagttgcagctggacttctccacccggatggcccccacccagtcctgcacacttggtccatccatttccaaacctccactgctgctcccgggtcctgctgcccgagccaggaactgtgtgtgttgcaggggggcagtaactccccaactccctcgttaatcacaggatcccacgaatttaggctcagaagcatcgctcctctccagccctgcagctattcaccaatatcagtcctcgcggctctccagggctccctgccctgacctcttccctgggttttctgccccagcctcctccttccctcccctccccgtccacagggcagcctgagcgtgctttccaaaacccaaatatggccacgctccccctcggttcaaaaccttgcacaggtcccactgccctcagccccacttctcagcctggtacttgtacctccggtgtcgtgtggggacatccccttctgcaatcctccctaccgtcctcccgagccactcagagctccctcacaccccctctgttgcacatgctattccctggggctgctgtgcgctccccctcatctaggtgacaaacttccctgactcttcaagtgccggttttgcttctcctggagggaagcactgcctcccttaatctgccagaaacttctagcgtcagtgctggagggagaagctgtcagggacccagggcgcctggagaaagaggccctgttactattcctttgggatctctgaggcctcagagtgcttggctgctgtatctttaatgctggggcccaagtaagggcacagatccccccacaaagtggatgcctgctgcatcttcccacagtggcttcacagacccacaagagaagctgatggggagtaaaccctggagtccgaggcccaggcagcagccccgcctagtggtgggccctgatgctgccaggcctgggacctcccactgccccctccactggaggggtctcctctgcagctcagggactggcacactggcctccagaagggcagctccacagggcagggcctcattatttttcactgccccagacacagtgcccaacaccccgtcgtataccctggatgaacgaattaattacctggcaccacctcgtctgggctccctgcgcctgacattcacacagagaggcagagtcccgtgcccattaggtctggcatgccccctcctgcaaggggctcaaccccctaccccgacccctccacgtatctttcctaggcagatcacgttgcaatggctcaaacaacattccaccccagcaggacagtgaccccagtcccagctaactctgacctgggagccctcaggcacctgcacttacaggccttgctcacagctgattgggcacctgaccacacgcccccacaggctctgaccagcagcctatgagggggtttggcaccaagctctgtccaatcaggtaggctgggcctgaactagccaatcagatcaactctgtcttgggcgtttgaactcagggagggaggcccttgggagcaggtgcttgtggacaaggctccacaagcgttgagccttggaaaggtagacaagcgttgagccactaagcagaggaccttgggttcccaatacaaaaatacctactgctgagagggctgctgaccatttggtcaggattcctgttgcctttatatccaaaataaactcccctttcttgaggttgtctgagtcttgggtctatgccttgaaaaaagctgaattattggacagtctcacctcctgccatagggtcctgaatgtttcagaccacaaggggctccacacctttgctgtgtgttctggggcaacctactaatcctctctgcaagtcggtctccttatccccccaaatggaaattgtatttgccttctccactttgggaggctcccacttcttgggagggttacattttttaagtcttaatcatttgtgacatatgtatctatacatccgtatcttttaatgatccgtgtgtaccatctttgtgattatttccttaatattttttctttaagtcagttcattttcgttgaaatacatttataaagaaaaatctttgttactctgtaaatgaaaaaacccattttcgctataaataaaaggtaactgtacaaaataagtacaat

SEQ ID NO: 302 - DNA, 328 bp, Homo sapiens
agtagacctcaaaggtcccatgggattctaatctgtctgctccaagaactacagattccaaaccaaaagaggcaagcaagtctgcgctgaccccagtgagtcctgggtccaggagtacgtgtatgacctggaactgaactgagctgctcagagacaggaagtcttcagggaaggtcacctgagcctggatgcttctccatgagccgcatctcctccatactcaggactcctctccgcagttcctgtctcttctcttaatgtaatctcttttatgtgctgtattattgtattaggtgttatttccattatttatattagtttagccaaa

SEQ ID NO: 303 - DNA, 6746 bp, Homo sapiens
ctgcagtgtttggtctcaccaagtttcccacaataaagagacatgagtcacctttcaagaccctttacccccaagaatgtggtcttcacacatgagaccaaggtctacaagtggtcaggagagagggggtctgctcagatgggggagtagtgcctgagctggcctcaagagggttaagtggccctgcactgaaaacctggacactgagttagggtagggctgggggaaaacttgggctttggagtcgtagggtctgggttcaaatccacagaccattcccttcctagctgtgtgttggtgggtaattcactggatctttctgagtcctggtttcctcatctgaggtaaaacgagtttgccggttggtctgagagctgttctaggcatggtggggagaccctgacaggcagaggcagccctgctctcaagcagttgatttacagctggggaaacaagacagccacaaatgcaatacctcaaactcaacttctcaccagaaagctccttttcctaattttcacagccagtccctcagcctcctgggccccaaatactagtaaaacctttgcctcctctctcttctttctttcttgtaatcatataggtacaaagtcctaccaattcttcctgaaatatgtttccttatcaaaaagtcctgcaaagccgtgcgtggttgctcatgcctataatcccagcactttggaggctgggaggatcgcttgagtccaggagttcgagaccagcctggacaacatatggagacccatctctaccaaaaattttaaaatcagcaggggtggtagtggcaagcacctgtggtctcatctacttgggaggctgaggtggggggattgttggagcctgggcggttgaggctgcagtgatctgtgattgcaccactgcactctagcctgagggacagagcaagaacttgtatcagaaaaaaaaaaaaaaagtcctgcggtactggacactgccattgcctatacgattcccactccctcatcctccctagcaggatatcaattttgttcgaagtgtcaatgaaggccaggtgcggtggctgatgcctgtaatcctaacactttgggaggccgaggcaggcggatcacctgaggtcaggagttcaagaccagcctggccaacatggtgaaaccctgtctctactaaaaacacacaaattagcagggcatggtggcgtgcacctgtaatcccagctactcaggaggctgagacaggagaatcacttgaacccggagtggaggttgcaatcagccaagatcacaccactgcacttcagcttgggtgacaagagtgaaactctgtctcaaaaaagaaaaacaaaacaaaaacaaacaacaacaacaaaaagcaaagtgtcagtgaaggtccagcaaaagactcccttcctattgccctttgcagccagggtcatcatgtgacacagttcagatcaatgagatggaggctgagggtccctgggaaagatgtttttcctatacaggtaccacctctttcagcttcactctttccattttccacgtgaacaggccttgtagcctggaggagctacagctgcctttttgagatgctgaggcaccctgtctgaagaaggccctcacatcactcaacttgactactgggtgagcccttggagaggcttcccagcctctgctcttcaagccgaagtaccacaggggacacgagtcccagagttacaggaccccagctatggttcatgtgtaaagggaaccattaggcaaccaggggaaatgatgaagaagatctacatttacaaatgtggaaagatgttcgtggtatattgttaaattaaaaagctgtttaaaaatagtttttgggtcaagtgagatgactcacttatacttttagtataagtatgtcccatgcaatatctggaacgtacttgtactaaggggtttctccctccatcggcacatcccaggcatcctggcagctgctggcctccagcaaccccacattctagttgtgtgggagtgggttgtggcatggaccctgtgggctaccactgccctgacctgcttcttcacacactggtatttgtatctgtggtaaacccagtgacacgggggagatgacatacaaaaagggcaggacctgagaaagattaagctgcaggctccctgcccataaaacagggtgtgaaaggcatctcagcggctgccccaccatggctacctgggccctcctgctccttgcagccatgctcctgggcaacccaggtaaggccttcccctcgggatcgatcctgatggcccacccagcctcgcactctcaggctggctgaacctggagcttggactctgtgggcacccaggtgcccctgcctccccccggccttctcccccgtcatggaggcctggccctcccctcagagccaggcttagtccggtgtgctgcccagcctgtcactggcctggccaaggaggagagacaggccagggattctggtcctaactctactggccacactgtgtggcctgagacccccctttccctcccaagcccctgcctccgcatctgcgtggtgaaggccattggcctcatcggtggatctgcgtttcctcgggcctacactgtctaggattgtgcggggctggtgagagaacaagatctcttccgtgttcaaggcagacttcctgccccctgcaccctgctctctcccaggccttgaggtcagtgtgagccccaagggcaagaacacttctggaagggagagtggatttggctgggccatctggatggaaggtaaaaaaagaaaatcccttgaaaggagattgagggaagtttctagacaaaccgacccccaaatctgtgttgctgggggaacagaggagaagagagagtctcgccctcctggctttctagaaggaacgtgagaacacgtgtttgtgctgagagtgggtcagagcggctccagggcaaagcatgtggacaggtatcctggccccctgcaaggcccagctcctgtcctaggccctggtcacctcctggactcccaccagccaggagaacgggctttccctctccttccgcctgcggaggggaagctgaagtctggtcttcctcaggtctggtcttctctcgtctgagccctgagtactacgacctggcaagagcccacctgcgtgatgaggagaaatcctgcccgtgcctggcccaggagggcccccaggtacgtgttggctctctgctcacctgccacagtccctctcctttccctcctccctggtggctcctggggtgaggtctggagctctctaatggtcaggaggtgggagtggaggctgggctgtttctgacgatgctggttttgttgaattcatgtctggccaggagggctacaggtatctggcagactcctccaggaggatcctctggggtctcaccctccaaggagcctggggctgcagaacccaaataggcagactcccctgggagttcctcaataggagaggggcaagtgcagggctgggaaagtactggggttgtgggaggctgtttctggggtgtctcagagcctctaagacaagcaaaagggtgggtaggggccaggcagccagttcaggccttcagtgtatccacgctctgggaagagatcacggacattcctgccggcctcagaaacacaaagggcccctttcctgggcactttcacgcgctcccagagtgtctgagagaccatcataagggctttctttcctgacagggtgacctgttgaccaaaacacaggagctgggccgtgactacaggacctgtctgacgatagtccaaaaactgaagaagatggtggataagcccacccaggtgaggccaaggggctacagagcctcctgtctgctgctcaatggaggggccagcctgtgaccaggtcggggatcggggagcccgggggcaccttgcacagtgatcctgggggagggcttcctagaagggaatctgtgagtccccgtgtgtctgtggatgaatttcagagaacttgtgaaattgtgactctctggaactgtgtaagtcagacggcagagtatacatggttttcatcatgtatcctcaaagagggcttgtcccagagaagttaggaatcttcccctaaagccctaacatttgtgtccaaggcagagtttgagaagctagttccccaagaggcctgggtcaggactgataaatcccagatctgctacttccaagctgcatggccttgggcaagtcacttccactttctgagcccctgttatcttatctttgaaatgtgatggataatagtccctatcttgcaagttgtcaaacccttttttttttttttccttgagataggatcttactctgagacccaggctggagtgcactggtgtgatcttggctcactgcaacctctgcctccctggcccaagcaattctcctgtctaagcctcctgagtacctggggctccaggtgtgcgccaccatgcccagctaatttttgtacttttgtagaaacagggtctcactgtgttgcccaggctggtctccaacttctgagctgaagcaatccacctgccttggcctcccaaagtgtgggattataggcatgagccactgcacctggctgctgaagctttttaaaagagctgagggctgggatgtgcttagctccacgtccagcactgagtaaatgcttaacgaatgactgtgttactaccaagaattattgtttcactctccctccttccctctcctctgctgccccaaactactcagcatcctggcactgcaggctcgcacttagccctggatacccagattcatcctcctcccctgggatggcatagaagagactttaaaaccaaatgagccaagactccaagctctgaccacacctcccacccccaccagtcttctctatgcaccccctctatatctggagcccccagccaggttctggaccaaggtagctacatggcagagcatttaatgtgtgcctggcagccatgggcaccattctccacacagaaggcagggacaggtgcacaaggggctgagaccccagcagggctaactgtccttgtctcaggagccctacctggccagtcttgggccaggccttggggactgggagtaggggctgacccgtctgtacagtctctggccccatggcaccaggtgccagctcctcgcacccagtactcccattgctagggctgctggaacctgcagggttggcagagctgggcaggactcaccctataaccatgtccactgtggtgctgctgctgcagagaagtgtttccaatgctgcgacccgggtgtgtaggacggggaggtcacgatggcgcgacgtctgcagaaatttcatgaggaggtatcagtctagagttatccagggcctcgtggccggagaaactgcccagcagatctgtgaggacctcaggttgtgtataccttctacaggtgagtgcagaggtgacagcagggatacctcctgagggttggagacagcttcccccaggatatatcaaagctgcctccttactcccccatctcccagcatgggaaagtgtggagaattgagcagatggactttagctagaaatgtttgagaaatactgattagagcttgggcttcagacacaggtggttgtggagtaaaatctggtctccatctctccctggctgtgtgaccttaagcaaataacttgacctctctgagcttcagtttcttcatctgtgaaggagagatagcaatcctgatttttgagattggaatgagaattgaaggaggtcaccgtgtgtgtggacctgaccctggggaaatgtcctcagactgaggctattcaaggtcatcagaccctcagtcaaactccaacccagcccagcacatggcccctggggtcgggagctggggccatatcctcccccacaatcctgggccctgagatctgggctagggaacccttcaggcaggggagcatgaggcctttccctccatggctgcccaggctgtgctgagagaacagatctcggctgtaggaaacggggccagaaaggggcctcggtgattggctctggcagctcagctggcacttgccaatagctctgggattttatgctggcagatcgggggtccccaccatttcctgtcattggagcttgtggcttttctattcaaggccccacagcctgctcaggctgccgactggcttccaggatgtgcctctgggtgtgttcagtagggtcaggtggctctgggaccttaagcaagtaacattctgagtgcctgcttctccttgaggacccaccacatctgcccacagctagctgttctctccgctccaggtcccctctgagccctctcaccttgtcctgtggaagaagcacaggctcctgtcctcagatcccgggaacgtcagcaacctctgccggctcctcgcttcctcgatccagaatccactctccagtctccctcccctgactccctctgctgtcctcccctctcaggagaataaagtgtcaagcaagattttagccgcagctgcttcttctttggtggatttgaggggtgggtgtcagtggcatgctggggtgagctgtgtagtccttcaataaatgtctgtcgtgtgtcccatacactgttgtagatgttatggatttagtggtgaacgagacaaccttaacagcattcacacagttagtcgtgaaatgcttactgagcactcaccacagccatgca

SEQ ID NO: 304 - DNA, 427 bp, Homo sapiens
  misc_feature (1)...(427): n=a,t,g or c
tgtgcatgttttaatttattaacacaaacatttaaagtacgctttttaaaaaaataatcatgtcttggcattttttcaggtactatattcatagcctcaaaaaatagaagtggttgggtctcttctgcccctgggntngggtgagctgcagccgcaccggggccatgtccctccctagaggcngctcctcccttccagccagcaatgttgcccaacgcgggaggccagctgtgcagaacccagcatgcaggcatctcactcccaattcagcctgggaaatcggaactgagagccccacgatgaagccctgagctgatgctgacatgacactaattcactggaaacgagggtgatgggggcacagagcctctcatgctgtgcgccctgaagcccaccctctgggaatggaaggggacttctcacgcga

SEQ ID NO: 305 - DNA, 413 bp, Homo sapiens
  misc_feature (1)...(413): n=a,t,g or c
aacctccaagacattttattttgacagaaaaggtgtgacacatccatcagaaatgggatcagaaatttttggtctcccagtccccagtcctgatttttaattcccaatttcaaaattctatactaacatccaaactataacttgacttttaaatttaccccactcctcgggaagagaagtgcaatgcaggcaggcagctgtttccaggagatcagaaaagggtaaatgaatactcaagatttacagcgtcaaaaggctatgttgaggataattcttatgactatgtaaaagacaaggtagtgaaattgtgagggccctggcggcacaactccacagaatgactgaagcatgctgcagtggagaactggaaatgtatcncttgttgccctccatctccacccaccctcaagact

SEQ ID NO: 306 - DNA, 432 bp, Homo sapiens
  misc_feature (1)...(432): n=a,t,g or c
ttttttttttcatgggaaaaaacatttatcatgccagttgccatgggtcaggagtgcaggcactgttaacctgactcttctggcttggggtctgtcacaagctacaaatcaaagtgtcaagtgggctgcagtctcacatgaaggcttcactggggaaggatctgcttccaagctcattcatatggttgtcagcaggattcagttcctcataggctattggactgagggtctcagttcttcactggctgttttctggaggcctccctcagttcctcacatgtgagcctcttccccatgggcaagctcacaacatggcagcccatctccatctgttcgggcctcggtcgcgccgccggggncttgcagacgcgaatgtaaacagaaacacagtgaaaggcgttcgganagcctcgtgantggggcaggggggcn

SEQ ID NO: 307 - DNA, 508 bp, Homo sapiens
  misc_feature (1)...(508): n=a,t,g or c
ttttttttttttattatttagaaatgtaaacatttatttaaaagtaggtagcaagttaaaaatgaatacttgcctgaaatcataaaacataatcaagttctttttaaaacagttaatttttttcctataatttactttcatcgaaagtatattatctttgtttaacatgctagatagaagcaatttagcaacataaaatatattagctatagtatgttcaaaagaatgagaaatataaattcagagatgagaccatcattttttgcagttaaaaaaaaaaatgttgattctggtgcaacatacactgattatccaggttttacattttagggctgaaaccctgaggaacctgctggtgactgtttagcactngagcagagttcagtgtggcatgcgcttcccagagttaaaagcnaaagcagactggagaaacnaaaaacccacatccttggcatttcngaggttttcacctggtaatcntagggtttccccaatttattagaatgtt

SEQ ID NO: 308 - DNA, 833 bp, Homo sapiens
aaaccagcctcatgtgacaaagcgcaggacccctcactgccccaactgcttgctgttctctctttcttgggctctaaggacccaggagtctgggtgcacagcctccttctctctgagattcaagagtctgatcagcagcctcttcctcctccaggacccagaagccctgagcttatccccatggagctctgccggtccctggccctgctggggggctccctgggcctgatgttctgcctgattgctttgagcaccgatttctggtttgaggctgtgggtcccacccactcagctcactcgggcctctggccaacagggcatggggacatcatatcaggctacatccacgtgacgcagaccttcagcattatggctgttctgtgggccctggtgtccgtgagcttcctggtcctgtcctgcttcccctcactgttccccccaggccacggcccgcttgtctcaaccaccgcagcctttgctgcagccatctccatggtggtggccatggcggtgtacaccagcgagcggtgggaccagcctccacacccccagatccagaccttcttctcctggtccttctacctgggctgggtctcagctatcctcttgctctgtacaggtgccctgagcctgggtgctcactgtggcggtccccgtcctggctatgaaaccttgtgagcagaaggcaagagcggcaagatgagttttgagcgttgtattccaaaggcctcatctggagcctcgggaaagtctggtcctacatctgcccgcccttccagcccttccccagcccctcctcttgtttcttcattcattcaacaaaatttggctgg

SEQ ID NO: 309 - DNA, 284 bp, Homo sapiens
  misc_feature (1)...(284): n=a,t,g or c
gcaaacatctttattaatntcatataaaaataaggtccatggacggtcctcggggctggggcttgcgggggcgaggtgcactttataagttacaggccaggctcctgctgcggctaagtatggctatttggngggggctttagggtgggtgctgcaagagcatttgggggaaggggcgggcgatgctnccctctntggccaagaggaggatgcaccagcccgtttncggcgggccacagcgnaggagcggctccccggccagccgagctnaggccaccttcctt

SEQ ID NO: 310 - DNA, 510 bp, Homo sapiens
  misc_feature (1)...(510): n=a,t,g or c
ttgtgtaaagtttattgggggtgttttctggaccaggacctgtcagggggtcagagaagcaagactgggtcanactggttacaggtgacttcccaggcatttctggagggctgaattgaagaaggaatgccaagactttgaagcctttcagactntccccaggagaagggtntagcattagacagagcagctctctttgaccaagagaggacatttcctgagaagaaacttggctgtgagatgtcaacaacccataattccagcagccatggnatgaagtttctcagttctggaatctgagtggagcactacagcatccactacagtggtgaaagaaggattcgaactcagggaaacctgacccctcatgacttcattataattctttccttgcaactcaatgactatcatcattttcactttacagttcaaatatagaacctcagagttaaggaacttgcctaacatgccngaaattttagggcccnaggtatacnaccgaaagcccca

SEQ ID NO: 311 - DNA, 464 bp, Homo sapiens
  misc_feature (1)...(464): n=a,t,g or c
ttctgttgcatctgggaaaatttgttccctaggtctgtcaactccagccgcatcgtgtctccctgcagatcttcacaagcatctagcgcagggtccatgaggaaggggacgtcccctttctgggagtacagaagtgggtcactggagcattagaagaacatcaacatcatctttctaacccaatccttttgaagtgatttacaacacacaaaacaaatagactatttgtaaatgaacatccattaggaggtcatgctcatttttgtctttnttttactgatagagctaggaaagccacaaaacgcagggagggccagtgtaccctatcaatataaccaccccatggggacccaacccctcccaaggacggnaccaatacagcttgggaatccgtggggcctaccctgtatttacccattaccttgtggacccaggtganggggcattttagggnccccgggggg

SEQ ID NO: 312 - DNA, 1465 bp, Homo sapiens
ggcctggccccggccctagctcgtcggctgtgtattggggcgcgtggaggctgcagtcacggtggcgcccgcggggacggaggagggaatgagtgaagaggagcaaggctccggcactaccacgggctgcgggctgcctagtatagagcaaatgctggccgccaacccaggcaagaccccgatcagccttctgcaggagtatgggaccagaatagggaagacgcctgtgtacgaccttctcaaagccgagggccaagcccaccagcctaatttcaccttccgggtcaccgttggcgacaccagctgcactggtcagggccccagcaagaaggcagccaagcacaaggcagctgaggtggccctcaaacacctcaaaggggggagcatgctggagccggccctggaggacagcagttctttttctcccctagactcttcactgcctgaggacattccggtttttactgctgcagcagctgctaccccagttccatctgtagtcctaaccaggagcccccccatggaactgcagccccctgtctcccctcagcagtctgagtgcaaccccgttggtgctctgcaggagctggtggtgcagaaaggctggcggttgccggagtacacagtgacccaggagtctgggccagcccaccgcaaagaattcaccatgacctgtcgagtggagcgtttcattgagattgggagtggcacttccaaaaaattggcaaagcggaatgcggcggccaaaatgctgcttcgagtgcacacggtgcctctggatgcccgggatggcaatgaggtggagcctgatgatgaccacttctccattggtgtgggcttccgcctggatggtcttcgaaaccggggcccaggttgcacctgggattctctacgaaattcagtaggagagaagatcctgtccctccgcagttgctccctgggctccctgggtgccctgggccctgcctgctgccgtgtcctcagtgagctctctgaggagcaggcctttcacgtcagctacctggatattgaggagctgagcctgagtggactctgccagtgcctggtggaactgtccacccagccggccactgtgtgtcatggctctgcaaccaccagggaggcagcccgtggtgaggctgcccgccgtgccctgcagtacctcaagatcatggcaggcagcaagtgaagccccagctggactcatggatgtgcaccctttgctccctgctctttctgcctctgggctcatgtatctgcgcagctctggtaccctctgtgggtgccatctctacctctgacacagactgcctgccttgaagctgagaaggcacagggcaaggagccaaggaccacagagcctcagccagcccaggatccgtcctcattttattggtgatgatgaatgggaatgaaatcagggggctgtctactagagcctggaataaatatgctgctttgtgga

SEQ ID NO: 313 - DNA, 6672 bp, Homo sapiens
cctcccaactggtgactggttagtgatgaggctgtgtgcttctgagctgggcatccgaaggcatccttggggaagctgagggcacgaggaggggctgccagactccgggagctgctgcctggctgggattcctacacaatgcgttgcctggctccacgccctgctgggtcctacctgtcagagccccaaggcagctcacagtgtgccaccatggagttggggcccctagaaggtggctacctggagcttcttaacagcgatgctgaccccctgtgcctctaccacttctatgaccagatggacctggctggagaagaagagattgagctctactcagaacccgacacagacaccatcaactgcgaccagttcagcaggctgttgtgtgacatggaaggtgatgaagagaccagggaggcttatgccaatatcgcggaactggaccagtatgtcttccaggactcccagctggagggcctgagcaaggacattttcaagcacataggaccagatgaagtgatcggtgagagtatggagatgccagcagaagttgggcagaaaagtcagaaaagacccttcccagaggagcttccggcagacctgaagcactggaagccagctgagccccccactgtggtgactggcagtctcctagtgggaccagtgagcgactgctccaccctgccctgcctgccactgcctgcgctgttcaaccaggagccagcctccggccagatgcgcctggagaaaaccgaccagattcccatgcctttctccagttcctcgttgagctgcctgaatctccctgagggacccatccagtttgtccccaccatctccactctgccccatgggctctggcaaatctctgaggctggaacaggggtctccagtatattcatctaccatggtgaggtgccccaggccagccaagtaccccctcccagtggattcactgtccacggcctcccaacatctccagaccggccaggctccaccagccccttcgctccatcagccactgacctgcccagcatgcctgaacctgccctgacctcccgagcaaacatgacagagcacaagacgtcccccacccaatgcccggcagctggagaggtctccaacaagcttccaaaatggcctgagccggtggagcagttctaccgctcactgcaggacacgtatggtgccgagcccgcaggcccggatggcatcctagtggaggtggatctggtgcaggccaggctggagaggagcagcagcaagagcctggagcgggaactggccaccccggactgggcagaacggcagctggcccaaggaggcctggctgaggtgctgttggctgccaaggagcaccggcggccgcgtgagacacgagtgattgctgtgctgggcaaagctggtcagggcaagagctattgggctggggcagtgagccgggcctgggcttgtggccggcttccccagtacgactttgtcttctctgtcccctgccattgcttgaaccgtccgggggatgcctatggcctgcaggatctgctcttctccctgggcccacagccactcgtggcggccgatgaggttttcagccacatcttgaagagacctgaccgcgttctgctcatcctagacgccttcgaggagctggaagcgcaagatggcttcctgcacagcacgtgcggaccggcaccggcggagccctgctccctccgggggctgctggccggccttttccagaagaagctgctccgaggttgcaccctcctcctcacagcccggccccggggccgcctggtccagagcctgagcaaggccgacgccctatttgagctgtccggcttctccatggagcaggcccaggcatacgtgatgcgctactttgagagctcagggatgacagagcaccaagacagagccctgacgctcctccgggaccggccacttcttctcagtcacagccacagccctactttgtgccgggcagtgtgccagctctcagaggccctgctggagcttggggaggacgccaagctgccctccacgctcacgggactctatgtcggcctgctgggccgtgcagccctcgacagcccccccggggccctggcagagctggccaagctggcctgggagctgggccgcagacatcaaagtaccctacaggaggaccagttcccatccgcagacgtgaggacctgggcgatggccaaaggcttagtccaacacccaccgcgggccgcagagtccgagctggccttccccagcttcctcctgcaatgcttcctgggggccctgtggctggctctgagtggcgaaatcaaggacaaggagctcccgcagtacctagcattgaccccaaggaagaagaggccctatgacaactggctggagggcgtgccacgctttctggctgggctgatcttccagcctcccgcccgctgcctgggagccctactcgggccatcggcggctgcctcggtggacaggaagcagaaggtgcttgcgaggtacctgaagcggctgcagccggggacactgcgggcgcggcagctgcttgagctgctgcactgcgcccacgaggccgaggaggctggaatttggcagcacgtggtacaggagctccccggccgcctctcttttctgggcacccgcctcacgcctcctgatgcacatgtactgggcaaggccttggaggcggcgggccaagacttctccctggacctccgcagcactggcatttgcccctctggattggggagcctcgtgggactcagctgtgtcacccgtttcagggctgccttgagcgacacggtggcgctgtgggagtccctgcggcagcatggggagaccaagctacttcaggcagcagaggagaagttcaccatcgagcctttcaaagccaagtccctgaaggatgtggaagacctgggaaagcttgtgcagactcagaggacgagaagttcctcggaagacacagctggggagctccctgctgttcgggacctaaagaaactggagtttgcgctgggccctgtctcaggcccccaggctttccccaaactggtgcggatcctcacggccttttcctccctgcagcatctggacctggatgcgctgagtgagaacaagatcggggacgagggtgtctcgcagctctcagccaccttcccccagctgaagtccttggaaaccctcaatctgtcccagaacaacatcactgacctgggtgcctacaaactcgccgaggccctgccttcgctcgctgcatccctgctcaggctaagcttgtacaataactgcatctgcgacgtgggagccgagagcttggctcgtgtgcttccggacatggtgtccctccgggtgatggacgtccagtacaacaagttcacggctgccggggcccagcagctcgctgccagccttcggaggtgtcctcatgtggagacgctggcgatgtggacgcccaccatcccattcagtgtccaggaacacctgcaacaacaggattcacggatcagcctgagatgatcccagctgtgctctggacaggcatgttctctgaggacactaaccacgctggaccttgaactgggtacttgtggacacagctcttctccaggctgtatcccatgagcctcagcatcctggcacccggcccctgctggttcagggttggcccctgcccggctgcggaatgaaccacatcttgctctgctgacagacacaggcccggctccaggctcctttagcgcccagttgggtggatgcctggtggcagctgcggtccacccaggagccccgaggccttctctgaaggacattgcggacagccacggccaggccagagggagtgacagaggcagccccattctgcctgcccaggcccctgccaccctggggagaaagtacttctttttttttatttttagacagggtctcactgttgcccaggctggcgtgcagtggtgcgatctgggttcactgcaacctccgcctcttgggttcaagcgattcttctgcttcagcctcccgagtagctgggactacaggcacccaccatcatgtctggctaatttttcatttttggtagagacagggttttgccgtgttggccgggctggtctcgaactcttgacctcgggtgatccacccacctcagcctcccaaagtgctgggattacaagcgtgagccactgcaccgggccacagagaaagtacttctccaccctgctctccgaccagacaccttgacagggcacaccgggcactcagaagacactgatgggcaacccccagcctgctaattccccagattgcaacaggctgggcttcagtggcagctgcttttgtctatgggactcaatgcactgacattgttggccaaagccaaagctaggcctggccagatgcaccagcccttagcagggaaacagctaatgggacactaatggggcggtgagaggggaacagactggaagcacagcttcatttcctgtgtcttttttcactacattataaatgtctctttaatgtcacaggcaggtcccagggtttgagttcataccctgttaccattttggggtacccactgctctggttatctaatatgtaacaagccaccccaaatcatagtggcttaaaacaacactcacatttattctgctcacatatctgtcatttgagcagggctcagcggggacagctccttctgtcctactctgtgtcaggtggggcagcttgagggttgggctggtgtcacctgaagactcattcttctgtacgtctgacaggcaatgctggctgttggctgggggcctcagtgcactacggaatagttggctaggacccctccatgtgggctagttgggcttcctcataagtatggtggctgggttggagggtgtcccaaaaagaaaggaggggatagagagagaccacttttcataacctagccttagaagtcacacagtattacttctgctacatatatatgttttaagaggcagggtctcactctgtgcccccagtctggaatccagtggtatgatcacggctcactgcagcctcaacctcctgggctaagtgatcctcccacctcagcctcccgaatagctgggactacaggtgtgagtcaccaaagcccagttaatctttagttttcatttttgtagagccagggtctcactatgttgcccaggcaggtcttgaactcctggcctcaagtgattctcctgcctcagcctcccaaagtgctgggattacaggtgtgaaccaccacacccagcccacttctgccatattctgttggccagtgtgacaaggattgctactgtcctacccaccctcctttccaccacatgtgcacatgcacgtgtgtgcacgtacacacacatacacacacacgcgtgcacacaccagagcccaccttggctcaagtcctcttttctgagaggacttttctttgtggcttcctaaaattcagtggaaaattaattgtttggggatgagaaaggttgaagcaccaaaagcttaccaaggggaatgtttgcctctgcctctgacacacagctctgtcctgggagtgagctggtttttagcggagacggagtcccaccttggctgcagggagtcgaaaggacttggaagctccgctttctacccagcgagcccctggtggcagtgggagctgcctgttcagctccagctcaccagccccagtgcccacaggatcagtctgattcccaagctctgctcctctccccagcaagtgagagctgggtgtcaagagggtctgaggaatccagacccggctgcgtggttgatgatctttgcagacaggcaagcacctcctgcctcgaactggctgcaaagggtatcaggtgctgccatccaggttcagcttgtaaatagctcaggtgtaccctgcacttgcagactctacagaggccatgggctcctgtgtgtgcggctacaggagtgagcactgaggtgtgctctgatcatccactgtgccatgtgccaggtttttggtctgacccactgcttttggtctgtgtgatgatgaaatgaggtcagagcctcgagttattaacactaacgatttgttaatgatagctactgtttattattttatttaatttttttgagacagagttttcactcttatgcccacgctggagtgcagtgagccgagatcacgccactgcactatagcctaggtgacagagtgagactctgtctcaaaaaaacacaaaagtttctctttttcaaaacattttactttaaaaggagccaatttaaagaaaactgttaatagttcaggtaacaggcagatacaggaaaagctgctgacagtgttgtatgaggtttgaggattttgatccaagctggtccactcagtccatagcagagaatgaaagggcccagagagggtggtgacctctgcctgaagtcacacagtgagtcgaggacagggaggtgaccccaggtttctatgtgtagggcgggaggatgttctgggacacagttcaattctcatttgtcacacactttggctattagagatcaaccccttcgctcctgtgtcttgcaatggcagccttggcaaacgctaaatgaaaatcgtgacaacacttgtgttatgaagcatttactttgtgttcaccttgt

SEQ ID NO: 314 - DNA, 174424 bp, Homo sapiens
gatccacccactttggcctcctgaagtgctgggattacgagcgtgagccaccatgcctggccctgtaacatcatattgacaataataatgtaggcactttggtaattgttttgtcttcctgagtggtatttctcaatgtgaactacaaagatacctatggccatatctaggatcgaagtcttttttttttttttttttgagacggagtctcgctctgtcacccaagctggagtgcagtggtgtggtctcggctcactgcaagctccgcctcccgggttcacgccattctcctgcctcagcctcccgagtagctgggactacaggcgcctgccaccacgcctggctaattttttgtatttttagtagagacggggtttcaccatgttggccaggatggtctcgatctcctgacctcatgatccgtcagccttggcctcccaacgtgctgggattacaggcgtgagccactgcgcccggcagatcaaagtcttactatgaacttccagggtgtaatgtacacagccctatctgttttttgtttgtttgtttgttttgagatggagctttgctcttgttgcccaggctggagtgcaatggtgtgatctcggctcacagcaacctccgcctcccgggttcaagtgattctcctgcctcagcctcccgagtagctgggattataggcttgcaccaccacgcccggctaatttttgtatttttagtagagacggggtttctccacgttggtcaggctggtttcgaactctcgacctcaggtgatatgcccacctcggcctcccaaagtgctgggattacaggcatgaaccaccgagcccaaactgccctatctgttttaagttgaggaaaactcatcctatcggcactttctcaggcatcagtcccaatcaagttatgttattataacagcctattaagtctccctggataacagacaaccctttgtttatctatccatactgggactggagagaacttacattgtacaattaatgaagtgacactatacctgtcttcgcagcctctgtctatatatgccagctttctatttgtctattgattagatgctgttcttttcatctgttctatagtcatactcccaatatctaattgtttccttaaatatgaatagacctgctaatgatgatattgtagaactgttttgtagctaatcgctgctgggctatgagtgagggcctcctacagcttgatgagattatgtcttcccagcattaaattattccaaacagatcaatttcaaagttaacaaataacatgtttgttagtaaaaatgtgagtcttacagtaattcaaataactactactgtggatagagcagccaatatcagttacaggaaaagtcctttgtggcaaccacaatgcaatcctcccaagagtccagctgcgtttttctttctctccgatggccctgtaggtgatcagtagcatttgaaaacattcctctcagcacagtggcagcccaggcctttcccctggaaaagctttgatgcagaggaaacctcccagtcaactgggatggtggacttctttggagggttacctccagatccttctgactttttaagtctcatggtttctaaagaagagaaaagccctattaagtattgagtatgattacgggaggattcagttaaatcaggcacaggaaggacaggcacagtggctcatgcctgtaatcccagcactttgggaggctgaggcaggtggatcacctgaggccaggagttcaagaccagcctagccaacatggcaaaatcccatctctacaaaaaatacaaaaaaataaaactagccaggtgtggtggcacatgcctgtaatcgcagctacttgggaggctgaggcagaagaatcacttgaatctgggaggcagaagttgcagtgagttaagatcatgccaccgcactccagcctgggcaacagagcaagattctttctcaaaaaataaaaataaataaaaacattaaaaaaaatcagccacaggacttggtcttggacccaagttagagctaggccatgcttgcttaaaggagtggctgtaattttaaacaaggctagtgggaaagttccaggccatcttaacattgtaggttgcagaatcttagccaatgagtctttcagagctggattcattaatctgttaattaattcattaatttttttatgctactggatgacagtaggaataaaatgactttttctgtctgattcaaatgctctggtattccaaaagggagattcatatttattaagagagtctttcccgttgtttatacttcctgcctaaggatcagcttctttttctctttcttcacagctgacaacagatgccctaattgtttcacctcaggttagcactattgcaatttgtctagcaagaccttatgtccccgccagatgagaaattgcagtaaagccaaagcatcagttttgcattgctcttcagtttctgaggctactagtagcaagtcgtctacatagcaaataatcatagatccctctggtgggagaaattcctctaagtgtttctgtaaatgactagagaaaataatgggagcattcaaaacccttgaggaattctttgccataaatatcagactttctcataagcaaaagcaaacaagaatttagattcatctgctagaggaatggaaagacagaaaatgcagaaaattgatcaattacagagaaaaactttgcagacaatggtaccaaagtcagaagagttgctggagtaaacagaacagcacacatatttacttctttaagtttttttttttttttttttgagacggagtctctctctgccgcccaggctgaggtcagtggtgtgatctcggctcactgcaacctctgccccccgggttcaagtgattctcctgcctcagcatctcaagtagctgggattacaggcacgtgccaccacacccagctaattttttgtatgtttcttagagacagggtttcaccatgttggccaggctggtctcgaacttctgacctcaggtgatctgcctgccttggcctcccaaagtgctgggattgcaggtgtgagacaccatgcccggccttctttaagatcttatacaaataaatttagcagttgaccatcttcatcacttttacctctcttctctttcagaagtgtgagactatttcaaagtggtggctttttcaaattatcccttgtttctctattttttttttttttttttgagacaagatcttgctctgtcgcccaggctggagtgcagtggcaccatctcaactcacagcagcctcaacctcccgggctcaagagatcctcccacctctgcctcctgagtagctagggctagaggcatgcaccacctcgcctcgctaatttttctttctttctttctttctttctttctttctttctttctttctttctttttttttttttttttttttgctttttgtagagacagggtcttgctatgttgcccaggctggtctcaaactcctgggctcaagagatcctcctgcctcgacctcccaaagtgctgggattacaggtgagcccccacatctggcctctaattcttttataacctatttcattccttctaattgagctcccaacaaaggagattgttttacacacagctatggcttatccctttggtaaattgattttatgggttctatagctcaaattaaatcagcatctcgattctctagggctcaaaagatgccttgatttgtgtcagctcaggaagggggcttttccggcactgaatatggtaggcttggaggtgcatggcaggtctctcgccaataggtttacagaagagtcaggaggaaaggggagcacttgctccttaggcaaaggcagagggcccatctgatgggaattggagggaagggaatatgtagaaggctgagtcaagatacaaacaacctgtactgatggaaagcaagagcaagagctttccaaggcaaatgcagaataagtagcaccagtctgtatgagaaaaggcaaggacaggtcagcctggcaaacagtgaccgacatacacacacttaaccctaatctcttcccgccactgccatctcctcaatctatccattttgagccatttgcaaagtatctcctagctgagagttttatcctcctaggcccccacccctgattctcttgttcctgccatcctgcatgccccagtctctttggacaatccctcttccaatgtccttgcttcttgcaatgatgacacgtgtcttgcttcctttcctttctgggttgcccagaacaggagttactccctttcagtaaacagacctgagcagctaacacagagtttttcagtttcttcttttcttctttgactttctctagagtcccaaatactgaatagctgctcctaagcttacattatagtcagtcctgccatcctaccaccttttcccttatttgagttgttgttgttgttgttgtttgttttgtttcttgttttgagacagagttttgctcttgttgcccagggtggagtgcaatggcaccatctctgctcactgcaactgccacctcccagcttcaagcagttctcctgcctcagcctcccgagtagctgggattacaggcctgtgccactatgcccggctaattttgtatttttagtagagatagggtttcaccatgttggtcaagctggtctcaaactcctgaccttaggtgatccacccacctcagcctcccaaagtgctgggattacagcctcccaaagtgctgggattacaggcgtgagccactgcgcccagccatattggcactttttaagccttgtgttttttaatgtcccgttgaccaaagcaaatcacatggccaagcccagatctgagagtgtggaaaaatggactctatctcttgcagggaggagctgaaagttccatcacaaaagggtatgcatccagggatggcaagaatttgaggccatttttgtgatccaaggacagagattgtcctcggacataaaattcaaggctggcagtttttttgttgttgttggcacatcagatataccattgtcttgttttctggcttctgtagtttgtgttgagaagttggctgtcagtcaaactgcataactataaaagtaatcaacccacccaccagctgctttgaatgttttctctttgtctttgctttccctcagttttactatgatgtgcctaggtgtggttttttgtttgttttatcccgctcttggttcacgtgacttctagaaactgacttgatatatttcaccagtttggaaatatttcatccattaactcttcaaatattatctgtgccccattctttctcaccttgtttttctgaactccaattaagcatatattaggtcaagcatggtcgctcatgcctgtaatcccagcactttgggaggctgaggcaggaggatcccttgatcctaggagctcaagaccaacctgggcaacatagtaagacctcatctctacaaaaaaaaaatgaacaaaattagctgggcatgattgcatgtgcctgtagtgctagctactcaggaggctgaggcaggaggattgcttgagctcaggaggtcgaggctgcagtgagtggagattgtgccactgccctccagcctgggtaacacagcaagaccttgtcttaaaaaaaaaaaaaatacacgcacacacacatatatgagaccttctttctgtatcccctatgtttcttacctccttttgcattgtcttttaccacctttttacctctccaagctttagtctggctattttcttctgatttatctttctgtttactatttctctcttcagctcttgtatatcccacccattgagctcctaactttaatttgtatattttatatttctaaatttttcactagattctttttgtagtttcaaattatctgctaaatttctcaattctgtcttttgtttccttgaattattaaatataattattttaaagtctgtatctgataatgccattatttggagtccttgtggctctatttttattatattacttttctaatttcatttttattaaattttcttttctccttatgacatgttttgtttgtttttaagacagggtctcacactgtcacctaggctggagtgcaatcatagctcactgtaacattgaactactgggctcaagcaatccccctgcctcagcctcccaagtgctgggattacaggcatgagccaccatgctgggccttgtcctcgttattttttattgagtgctggacattgtgaatggaaactataaatcatttgaggccaaggacaatgttatcttcctccagagaaaatttacatttgtttctggcaggcagctggggcactagaaatcctgatcaccttaatccaattttcagggattgaaagagctcaaatcttgactacagtcccttaggggacagggatgcagtcctttagagggctattctatttccagtttacacttattcctagacctttgggtttccaacccaaagcacgaggagcttactagggccttcttccttggtgagccctgcactctgacttttgacccctcacctcttaagtctgctaactgttctgctcagcttcttgggccctcagctgtctctgctggaattagcggatggccataggggataagcagccttaaatgctgagctcatctctcagctcatttcctttctcccatatcttggtcccatatgcttcactgcctattatcacttggatattttcaagcaaatattttccctgttttactgagtctgtttagttgttctcagtggaggttgtggttcaaattacttattttgtcattgccagacacagaagtcattcagcactaggttttaggctctatttatattgttgagtctacatataatcttgcttccaagtactgcataacactccctaatgttttatctgcttccttagtcactacaaataatgctaccatgacctttgtcatgcaggccattgctctgtcacccaggttggagtgcagtatcatgaacatggctcactgcagcctcaacctcctggactcaatggatgctcctgcctaagcctctcacgcagctgggaccacaggcataagctaccacacacggcgaatttttgtattttttgcagagatgaagtctcaccatgttgctgaggctggtctcaaactcctgggttcaagtaattctcccacctcagcctcccaaagtgccacgattacaggcgtgagccaccacgcccagccaagaatttttgtgatgtatccccaagagcagaattacagagaattaccaaaattacccaacctagtgtatacttaattgatgagatactgacatattgttctccagaatggttgtgttggtctgtatctccaccagcagtacatgagcgctctctagccacacatccctgccagcatttgctattgcctgcatttctaggtgtgtgtgtatttgtcaatctaatgggtatgaagtgatactgttgttttgatttgcgttcctctgataatcaatgggcttgcacatcttgggtgtggcatgtctgctgctggtgctgccaacacttggtggggcatgtagaactgggcctctgacctccgaggaaggggtgtcatctggcgggttccgagaaggccgaaatgagctggagcctgaaaccactgctgctgctaagggccaactgagactggcgctacagcaacaggaatggaaaacaaacaggaaggagcaagacccttctctccttcccagccttccagtctccctctagtgtcccagttggtggaaactgacaaccagccagaagacaaagaaggaatgtaggttcagagtcccagcgccagcctcacaaagcagagtatggcaccttccccgcccctgcccctttggcttcgcaacatcagttcgaagccttcttgcataatttgaacttccctcagcagtaatgacaactttatgtttctgcctaacaagatccttcatacaaatatgctcctaccctcttctcaagaggggagacataaagtcccaacagtctttgtaatcatctccaaattacagtcacggtattggtgatattaatttctcctttaaataagtcatagtaccacttaactattctgtgacctagaggctaagttgtaaagtttaccatcaaaacaactgctattggccaggtgcaatggctcacgcctgtaatctgagcactttgggaggctgaggcaggaggatagcttgagcccaggagtttgagaccaacctgagcaacacagcaagaccctatctctacaaaatattacagataaaaaaattatccagtgtggtggcgcatgcttgtagtcccagctactcaggaggctgaggcaggagaaccgcttgagcccaggaagcggaggttgcagtgagccaagatcacgccactgcactccagtctgggcaacagagggagattgtctcaaattaagagagagagagagaaagaatcaaagtctgtaagtaccgtttcgtgtcagagaggaggagagatggcagagcctttagggaagactgtgaagatgtactgttggccctgccaggttaaaagaaatgtggtctttgaagtgcaaatacataagcttttcaaacctgagcaataaaagaaagtgctctggtggtcttttctctggtgttactatttgacagggcagtagcaagctagacgcaggggctatgacgctttgcttcagtaaagtgactgcgtctgaaacagcagctgcaatcaattcacctgcggtcattcttgaagagccatccaccttctgccaagcaccaaatagacaaatagcatacaagagacatcacgactgcaaccttcaagttcaaggcactaatctctgctatttccctcagaatcgtgacattgggttcctttctctccattaggcaagggttgttctggcatctcactatcattgaatttacgccacagttgagttccagtttaaatcaaccaaccacataggctgttagagtcactttcagctgcatggaccaacattaaatataggccctctggtaaatgcccccagctcaagaaattgtgcccaatccaatgttatatccatcccttttggtagaacatccttagaattcacttccacacatattcgcccaggtttttgccaatatttcttaacgaaaatcatgttattgttctggtgtataggttttcctcttgtgttttagtgtgtacctgtccacctgtggtggattgcaccctcattatgggacagggggtggttgtggtgggttctgagaggagaatgggtatcctcttgcaaggcaccagagggctaccaggtcagccctaaaaattctcttactccttgtacctgcagggctaacagtgctaaatcaaacacaaactttaattgcttgggttacagaatcgcaacgtcagttgattcccagcctcgccacgtgtctcacatgaaatgtcaggcagtggtcgggaggagtgagaccctgaaacttaccattgctttcaagctcaaggacgcaaacaaaccaatctccaaaccccatctttcaggatatgattcttgacaccactccagctgccaattttgctatcagccaggatctgatcaggaagtagaaaggatgacagctcctcccttggtgcatgcagttgagatttcaagtgatcttcctgccttggcctcctgagtagctgggactacaggcatgtgccaccacaccaggctacgttttgtattttttgtagacgaatgtctcgaactcctgggctcaagtgatcctcccagctcagcctcccaaagtgcaggcactgcaggtgtgagtcacagcacccagcctcctctgtttgaagagtcctaactcccttcgttccccagcctgaggggctgtgttaatttcctggagctgccatagcaaagtgccacaaaccaagtggcttcgacagcagaaatggattctctcacagttctgcagggaagaagcccgagatcaaggctgtgagagagcaggaggatcacttgagcctgggagtttgaggttgcagtgaaccatgactgtcccactgcactccagtctgggcaacagaggagattctgtcgaaagaaagagagagagagagagagagaaaaaggaaggtaggaaagaaggaaggaaggaagggagggagggagggagggagggaggggaaagaaataagaaaagaagagagagagaaagagaaaggaaggaaggagagagagaaagaaaggaaggaagaaaagataagaaagaaaaaggaaaggaaagaaagaaggaaggaagaaaagaaagaaagagagaaagagaaaaggaaggagagagagaaaggaagaagaaaagagaaagaaagaagaaaaaagaaagaagaaagaaaacagaaagaaagaaaaagaaagaaagagaaagaaagaagaaaaggaaggaagggaagaaaggaaggaaggaaggaacaaaggaaggggaagaaagggagggaaggaaggaaggaaggaagttggttagagagaggcccacagagctgaagctgggtctctgaggtctgaggtgggggcgtggcctagctagttgtggaggagtgagctcagtagagggacttgtggggctgggatccagacctctaaggagcaggggtctggctgatgctggggtctctgagctcaggggatggcctagtactcagattttggagcatagggcactgggtgtccggtggtggtgtctcagaggtgggatgcaatgaagctggtcttgcaagtgttgagagatctgaaaattggcttcaggcagtgccacggaaatgaagcacttgctgcaagggtgaagaagccttgttagatggtgcgcccaggaaggagcaggtcccttcttcctcctccagtcttgtgggctcccttaaacgcccccagctagcagagcctaggagggaggcgctggtaaagcaggagcatcaccaagcagaggacagcaaagggggtggcacgcccactccacaagccagcactgctccttctagggcacggatctcagagaaaggactgcatatgcccactttatccatgatggctaccattggaaacaacccacacgtccatcaacgggggaatgggtaagtgagtcgcggtgcatgcgtgcatacaatggctactagtcagcatcacagagggaagaagggacacagacgtcaacctggatgagtctcatggaagtgattccagaaagaagccggcacaaagggctccagagcgtgtgcttccatttccatacccgtcaggagcaggcgagaccatctacagccatagacggcaggacagggcttagatctgcagccagggattggctgcctggaggcacaaaagcattctctgtggtgatgcaaatgttctttagttggtccaagttgtggctgcatgtgtggataggcaggtgaaaaaaccaggcgtgcacttgattttctgcacagtaatcctcaataaggacttgtttcacggatttttagggcagtggagttactctgtatgatactgtaagggtggatccatgtcattatacctttgtccaaacccataaatggacaacaccagagtgaaccccgatgtcagctatgggctttagttcatgcgagcttctcactgtggctcaccaattgtaacaaacgtactacactgactcgaaatgttcatcatggggaggcgtaaggggagtgacggggtctgtgggaactccttactttccgctcaatttttctgcaaacctaaaattgctctaaaaagcaaaatgccttaattttttaaaaacccaggaaagcagcccagggccgatgtggcagctccaggtgctcaggccctcgggctgcctttgttgctgttccgccatcctcaacgtgcgacttccctttggtgcgacaaggtagctctccccatgatcacagatcacatttgcctttcagctgtaaggagacagaaagtggctggcacaaggccatgcgtggtggctcacgcctgtaatcccagcagtctcggatgccaaggcgggcagatcacctgagatcagtagttcgagaccagcctggccaacgtggcaaaaccctgtctctactaaaaatacaaaaataagctgggtgtggtggcgggcgcctgtggtcccagctactctggaggctgaggcaggagaatcacttgaacctgggaggcagagggtgccgtgagccaagatcatgccactgcactctagcctgggtgatcgagcgagactccatctcaaaaaagaaaaaaagaaagaaagaaagaaaggaaggaaggaaggaaggaaggaaggaaggaaggaagggaaggaaggaaggaagggaaggaaggaaggaagaaaggcgccagcacaggtttgccctgcaggtatgggtgcactcatgccccaccaccctactgggtgcatagaggctgggaaatgggtcttcagctgagctgccatgtccccaagccacaaatctagtgttatggaagaacagaaaaacagatattggagggcaataagtggacgctgttacaggtggggatcaagggggacaatgagtgtagaggagtcttgaggggttttgctgtaaacaggagcagtgaaacggggcaagagccagggggcatgcggaggcaggagcgggagcttccggtgatagaagctccaagggcatgttggtatgctgctgggcctgaccccacagggagagagaaaaattacaggtgcagaaaacaggaggagagagggggtctcaggggtggcagagaccactgcacatggtgggaagtgttcacctgagggggctagggctggggaggggacagatttgatgatgggaactcaaggaaagaaattctcgtcagatgctctcaacttgctcagtgaaacatgaaacaaagttctcaccttgaaagtgcagggcctgggggctgaggggaaggtgtgaggccttggagaaccagggaggaaactctagaattcccaaggaaggctggctctgcctgggtccacttgaggcttgtggtcataaatctaaggtgcttagtcctgggctgggtgtggtggctcacgcctgtaatgccagcactatcgggaggccgaggtgggagaattgcttgagcccaggagttcgaaaccagcctgagcaacatagggagactccatctctacaacaataatttaaagattagccaggcgtggtggcgtgctccagtggtcctagctacttgagaggctgaagccagaggatttcttgagcccgggaagtggagggctcacctgtgctgggttttctttctttctttctttctttctttctttctttctttctttctttctttctttctttcttttttctttctttctttctctttctttccttttctttctctccctccctcccttcctttctttctttcttgcttgctttcttgctttgtctttctctttctttcttctttctttctttctctttccctccctccctccctctctctctctgtctctctctctctttctttctttctctctttccctccctccctccctccctctctctctctctctctctctctctctctctctttctttctttctttctttttctttctttgtctcgctctgtcgcccaggctggagtgcactggtacaatctcaggtcgctgcaacctgatttttttacctgcctatccacacatgcaaccacgactcggaccaaactaaagaacatttgcatcaccacagagaatgcctttgtgcttccaggcaaccaatccccagctacagaggtaagccctgtcctgccatctatggctgtagatggtctcacctgctcctgatcacgccactgcacttcagcctgggagacagagtgagaccctgtctcaaaaaataaataaataaggtgctttgtactggtttagagggctgggtaccccagagagaacgatgccaccggggcacatcatgagtcttccactgagccatggagctgtgtcccttgagacaggggaagaggctcctgccgctggccacactctactctcatgtttgagcagtgaagggcccggccatggtgacagctaagcttggtctcaggaggccagcagaggcgaggatcctgagccccagcaacaatgtgacagcaacacccaaggcagccaacagccaggcctggcagggtgggtggaaggcccgggctctgggaaggggcagggaagcatcaggactgtgtggctgggccacacccgggcccgcctggcaggtcgctcctagcacctcccacagtgtgacgtggacaggggaagtaagtgttccgcgaaataacaaaaggtgctcttgattttcaggttttatttgcctgttataattctgatattatgtacatatatatatatacttttgtttttttgtagagggcttatcagtagaccaagcacaggcatacagggaggctgtggctgctgagcagtgctgggagaaccaatctttcctttttttttgtctgtttttatttttcctgggatgggttcatcaaagctaattgctatcaatcctagaaaccacctagggactcagacatctgcctacacactagtggcgtaaagggaaggacaggggtacaaactttcaaagtcacggtgtatttacattcccaaggtgggggcgggaggaggctgaggaagacaactgttcagacgatagggagggcagggctgctaaggggtcctggggggtgggggcggctggaagaggccggccagtgggcagtgggaggaggtgtgcccgccccgcagccaggtagtgacggaggccacttggatgttgtgtggtgggtaccgaaggcagcgtgtgtatggagctcctgaaagccggccatggggtgggctgggcggcgggaagaggcggtgctgccagagtgcgatgctgggagtggggggactctgggctctccagatggcctcccctgcccccgcggccagtttgcccggctcccatcccggttggagcagagatggcaaagaaaagacagcagatggtggggacaccgagttctgttcccagtcccagccaggctggctggggagtggctgggggagggggaaggtgccaaccctggtcctgaggagaccccaccatgtctgcccccagtcagggagcaagaaagacagcatttcggagaccctttcgggccacccctacttcttctcccccaaaccacagcctctctgcccaaatgggctggcaaaacagcacccaaaggcccctggcatgtgggagatctgcccaagctggggcagagcagcgtgtgcccaggaaggggtgcagctgggttttggcaataaagtggggaccgggtggtaggaaggggatccgaggcagcaagttctcctctgccccaactccagcctcccatgggcctgctggagagggaggggcctggatcccaaggccaggggcacagcatctcctgtcctggactccactattctagggccacggcagggttgatgggggaagtggcccctgagctgtcattgccccctgccgcctccttctccttcttgccactgtactggccaatgaacgaaccatcctcgttgaactgaacatccacgctgcccccataatcggccaggctgtcgtcactgcccaggggcttgatgtccccgttgagcgatggctggctgctgccaaaggccttctcctcgttgtcactgcagaggcacagggcaggtgcgagtgagagcactgccgagcccctgcaggagcctggctgggggtgaggcagacgcccgcctgccttccatttgtttagaatgcgctcagaaagagcagctctggccaccctggcaggcaggtctggagctgtcatctttgggcattccccagatcctggggactgtgagggagaaaatgtgcgctcggccaggggattatggggcctggttcctgtctgggaagctgtctggggcctcccttggggagaggggagcagtgaaggtatctgtgtggagaggaggggctggggcgtgttggcctctccctgaaatgaggagctgccgggcctgggggctgggaagtgagagtcctgtcagagccccggcagccaggggacaatggcacaccaggcgcacattgtctatagggagaccttgctgttggcccctccccaccgcccctgccttacctctccagggacctgaagtcacccggcagcacagagaagagagagagggggtgagatgtgaaggccagggtggagctgagtgccagcacccactcctgccccggctcacctgtactcgccgaaggtctcatctttcatcggtcgggcctcagagtccacctgggtgtcctccttatccttcactggagacacagagagggacagcttcttctcccgccccagcctgacccggggctccaggcccctctacgccccgcacccccagcactctgtctcaacagcgcccagaggcaagaggccttgaaagaaaccgctcaccccctgcggtccagccaccacttgcctgttgccccaaccccggcctgggaggatgatccccctgcctgcccccaccatgcgcctgtcatcttgtggggagctcggggaatccaggaggccttgcagaagggtggaaggggcgaggtgctcctctctgccctcggctccacccccgtcacgtggggctcagaggctacctgagtatttgccgcccttgctgcgcttgatgaagcagaggatgagcaggacgaggagcaggaggatgatggcactcacaaagccgatgaaccagccctcagtggcgaagccagcaggagggagcctcacgcggcctgagggtgagacaccagccccccgtgctgccgcccaagccagaacccgacctgaggccctgaagtatgctcttaaagttggggccctctggggggctaaggagtgacagggacagggaaaagggcatctgcggaaagggtatgaaagggggctgattcggggacacccagattctgggaggagaagcagacaggagccgtggagggagcctgggcagtagtggccattcaggggacagaaggacatgaattgtgcagcccccatgcttccctggcaggtgatggcgggcccccggcgcctcacctgtgccattggtcttcacagccatttggtgccggaacatcctctccttaaacaagtggatctcgtagtcagtgtcaggctgcaggtcccactgcgtgtaggagctctggttgtagctgacatactgtggcgaaagggaagccccacccttctcttctgccagggagagagggtggcagcaggggtgagtcggagtgccaggcaacccctctggcccagagcccccttccccaccacgccccaaggccccctttcacgcttacctcccaaggctttgaacaagatatggaacctgaagttgcactggccctccttggggacccaggagacgacactgtagttttcacccgctgtggctgagatgttgccaaaatctgagatccctggggggatgcaggggaacgaggagagtgtggcagctgccaggaagtctaaggccctccctcctggacccggctggccggggcctccctgttggcaggtcattcctccagcttaccagacaaggccatagtgcctccttcccgtacgatggcttcaccagggccctctttggtggtggcctgaagctggaagcggtaccgcaggtgggggctgagatcggtcaggttgtgtgtccgaagttcggggtcccgaaggttgaaggacagttgccccttgcccccctcatccactgtggggacagacaggggttggctgtggctgcagctctgccccctccccgtggcccctccacctcccttccctgctggggcggcgcacgcacgggggtggtaggagagcacgtagccggtgagcacgccgttgtggctgagtgggggctgccagcgcagcagcaggctggtgttcgactggcactccaggtgcaacgcctcggggtggccaggcactgcagggcacagaaccgagtggcaggtaggtcctcgcccaggtctggggaggagggcaggggatgaggcgtggggtgcaggactcacctccctctggggtgctgaaggtgaactcgctggcgggccccgatcctcgcccgttaaaggcctgcacctccaggtggtaggagctatagggccgcaagccactgaggatgacactggtggtgttggcgggcaccaccacatggtctttgtggatatgtctcttgctgtgcttcctctgactgccctccctccagtacgtcacctgcacaagcgaacaggagacctcgcaggggcagaaggcacccagcagggcccccagcgcacacccccaccacccttaatggggaccctcctctcaacccaagtcttccaggagagcggctggcaggtggcaaagccccctcaccatcctgtcgctttacctcagtgatcaccctcctgggcccccatgccttcaacccttacattgtatccgcggaggtggcccttgacctgggccaggtccaccggccgccacttgaccagcacggcacttgagttgaggatttcaatgccttccagctcagggattgcctgggggtctggaaaccaccagtgacttggatagagccataggctctcaccccagccctgaggccaggcccaagcccctacacacagagaagacgaattcggatattttatgaggtacagtttgaggaggagaggtgtgtttgcatggtctcaagatctcttcctggactgcttattagttgcaaaggtgaaaatagtagcttatacaaaggagaaaccatggctgggcgtgatggttcacacccgtattcccaacactttgggagacagaggcgagtggaacatttgaggtctggagttcgagaccaacctgatcaacatggtgcaaccgcatctctactaaatacgaaaattagttgggtgtggtggcgcgtgcctgtaatcccagctaatcaggaggctgaggcaggagaatcgcttgaacccgggaggcagaggttgcagtgagccaagaccgctccactgcactccagcctggatgacagagcaagactccatctcaaaaaaaaaaaaaaagaaagaaaagaaaagaaaagaaaaaagaaaagaaaaaaaggagaaaccagaaaaaaaacttgaccgggtacttcaagttaccatctggtcatgttccagattcaaggaaatgaaagaagcagcattggctgatataactggaataccgctgccaattatagaaatgtgaagtgtggggaatttcataacgtcgctctggttatgtaagagaatatcctcatccttaggaaaggcgcacaccaatgctgagaggtgtggacatgggctggggtggaagcaggcgagctcaaccgtgggcgaggggccctgccggatactcacagtcctctccagagtagccgatagtgacctggggctctggtcccttgccctggctgttgacggcctggactttgatctcatagggcacgaaggtggacgtgttggacaccaccaggaaggggtcgctgacaatctgctcctgccagggccctcgtgtcccctgagggcgccactgcacgcggtactgaacctggggggcgttccagtccatccaccggagcggctggaggaggccagcagaagaggagttggttggccaagaacaccagcattctttggcccgccccccagcacaaaccagcatccccagacatcagccccttcctttgcatagccaagggggagcaacagacacccaggtcatggcctcatgtcccccaggcagctcagcccagggactctcaccttccacgtgatgaccatattggtggtctcatttccttcccccttcacatccacagggttcttctctggggctggaaaggaaagtattaacacatcaatgctgcagcctcttttggagagccacgaggaccgagggccaaggaacaaatggctcattctggcaccaagggagtccagccccctcgcgctccccctggaaatttggaagcagaggaacttgggcatggcacctctctaagccctcccttcacagcccggagcccttccaggtggcatgggagtgggtgccaccctgactcacctgcctcaggtgtgaccacagtctcagagaccgggctgggctccccggggccatatttgtttatggcagtaaccctaaaggtgtagtggacatagggcgacagcttgagggtggtagaggtctggttccctggaaccttgcccagactgtaccatttttcaggcgccatttccttgtcctcaaattcaatgtcatattctgccaagaaatgaaccgacaatggagtgatcagcatgtggctttgggggaagggctgtggaggggttgggtacagtctgggtccctgattacccaggccaactggcatctccagattcccatgaggaaccgtgagtccccccaaaccgtgtccccccaggaaggctccaggaggagggaggaccccaggaggggccagggctggcagaagtgacggtggggtggcactgagctcaagcctcttactctcaatgggggcattgtggtcttctgcaggactccaggacacgcgcacctggctctgcgtcagcaggtgcaggtcggacagcaccagccgtggcaccggcccagggctccctgagggtggggagggtcggtgcttgaaagggcccagggatgtgagccccggccttctggagtggaggcttccaccctaggacttacccaccaccaagagctgtgccctactctccaccacatccagttcggtactggccacgcagctgtagttgccctggtcgctgtagtccaggctgtggatgaccaggcgcccatcctctatgaagtacctgcggaggagccgtgtctgtctttcctgccatctgggctcttctcccctcccatccctccctcctgtctccttcccccgctcctgtcagagccttccccatcaaagcaaggacgaggccaagaggtctggacttccagcttttcccactctgccccctttcaccgtcactgtcctcacttgtcactgtccccaagctcctggaggtctcgaccgtccccacgccaggtgatgctgggctgcaaggaggggtcaaaggaggcctggcacgtgaaggtcaccctggaacctttcttctcgattgtgctgcggggcccctgagtgatctgagttgcatctgagggtaatgcgtgcgtggggaagtcactctgttgtcctccagaggcccagaccctccctcccagaggcactgccagccatgtggcaagggttgcctgacctttaaccttcaggttagccatgatggtaacattgttttggtcattggcagccaggcagaagtagcgtccggtgtcattggcctggaggtctcgaatgcccagggtcccattggcataggggaagaagcgttcgtcctgaagcactgttgtcccatcctcgtccagcctggagggagcagggcgggcctggctctgactggctggcctgggctccctgccctccctggctccctggccactgggacacgacactcaccactaccaggacgagacactcaccactgaacactgggcacaggcgctccgaaggccttgcacagaaggtaggcagtgctgccctggacagccatgtacgtctgattgtccgcagtcaggatcttggctggcagctctaggggaggaacagcctcaggagacagggcaggacttgggaccacagctgggccaggagccagggaccctctgcacggcttcctcgggcccccaagagccctgcaaatcttggttccctgctcccagctgaggcccccgccaggctgtgtctctctctgccttcagacactgccctctgcctcagatgcgcctctggtcacagccacccaacttttacgttattccaggcctaactgacagtcacctctccccagaagccttcctggcctagtccccagccttccctgaagttccaggagaggtgccacctgggctggccttggtcacatcctgtggcacagcggtccgctcagtcacagtgacaagacctttcccctcttacatctccctcggctatcgtgaggctgagtgagatggggcgaagggtgtcagcaaggagaaaggtcggcgccagcctggtaggccgaggacacatcagctgccagctgagccactctggtggcctggcccagtgggctgcagggacagactgggagttaggaggtaaggaagggagggcactcacggacaacgtagatgtaggcattggccagcaagagcccgtgccggttgcgggcctcacattgggtcaccattgtgtcactgggctgcacgttgctcaggatcagggcgccacgctgaatccggtacttctggtctttggccagctctgtgcatgcagcaggtgggcccatgggccacagcccggcattgagctgcgttgaggcccttcctcaccctcctcttcctctcccccacagcccccagggctcgccacactccccactcctgcctgaggccctgctcaccctccacagggatcccgttgattctccaggtgacctctggttggggcctgccctggacttggcagtccaggcgggcagtctctcctggcccatatagatggctctggggcttgtgcagccagtacggggcagctgggaggaaggggagagccgccctgagcccgcagccagcagctggctcttgacccggcgcagaccctcccctcccccatgacagtgggcatcacaggccactgtcccaggaggtccataccctccacggtgacatagtacgcatgccgggcactgcccagtgagttctcggccaggcagcggtactcgccatcatcctcctcgcccactttcagcagctgcagggtcttgttgtggttctggtaggtgacacggtcggctggcatggggccactggggcgcagccatttgatggtgggcgtgggactgcccgggaggcaaagggaagagagcagaagggagaaaggacaaggccaatcaccccagccccctataccccgcggtggtctgagctccctgctagggctccgccaccctgccctgccctgccctgccctgggttcccagactcacaagccctcggcgatgcactccaggaccaatggctgcccctgcaaggccaccaggtggctgctggagttggtggggaagagcaggcgcggcttcctgtcaatcatgctgttggctgccaggagaaagtgggtgggtgggctgcccactcttccctccaccccagaattgcaaggctgagggactcgacactccagccagcccccggggcctctgtgtcttcctccattaaggagagtgtcctgtctctgctctcgacgcctgggaaggggtctgggcagggtagaggtgggagccaagctgttcttgaggaagcctggagttgtcagatggacctatggtgggaagggccatgcctgagggtgaaaggagtcagggagagagtgcagagcctctgagactcactggccttgacccggaggtcaatgggttccttctgaatgatggtcctggtgcctgggaagtgggcgtggcagatgtagtctgagtggttgtcggaggtgagcacattggcaaagtagaggttgccgttctggcccatcgtcacccgctcgtcctgcttgatgtgcaagatctctgcagggggcaaggaggccgaagtcatgaccccgtccaggaagacacccccgctaacaccccgaccccacgaggcagccgctcgccggcacccactgctgttcatccagtagatccggagaggctctgcacttgggggagggttgcaaggcagaaccactgactccccttcctccacctccacgggcttcactgtctcctttggccacttgggggcacctagaagggacagacgggctgacactctcctcctggtccagatggtgctaggcaggagaagggaggtgggggcaggggggtggcgggctacaccagggatggacgagggggcgagagggtcaggccagtagaaacttcacagaaaaggaggcagacactctggataccttctggactcatagcagagactagcacttagggaggccagggtgagcaggagaccaggaggccaggaagggttaaccttccacggttctcagctctccctgcccaccctaggaaaggacgggtggggggaggctgaggctgaggtgcagtgatgggggaggggagctgtggagggatgcaggagtcacagacccttccatcatcctgacacagaaaccatggcaacggttcccaaggtaactggaggggtggggaggggagaggagagcgctcaggaagcagaaagctcagggaggatggaatgcaaagggaaaaccccagggaaaaggcgacacagatcaagacagagccgtggagcaagagagaccaagtcggaggtggaggggaggagatggagagccaagtggaaaagccagagaagaggggccctgctaaggagtgcaggtgtagacagagatgactgcagtgactcaggcaggtctgcccagaatcagtcactccccccaccagcccgccccccccctccccccccgccaccttcctgctcagccatgaggcaggcaccaggaaagcctgagggagtgaaagggcatgagatgaccggaagtgcaatggagacagagacagggcaaaggaggagactgcacaagaaacaagatgggccaggggagaagctggggtggggtggagggctggcaggacacccaggcccctcgccacgagacaactggctgacagcagcttccagcccacaatcccacacgaactccgggacctgccctccctggtccctgcagcgcctcgcaccctcggccatgagccggatctcatgggacatggcggtgcccagcttattgctggcaaagcagcggtagatgccctggaacctctgagcaaagttgctgttgttgcccgtgatggtgaaggagccagagtggggcgactggtacacggtcacacccagctcttccttgggtttgaagtggacaccatccctcgtccagcggaacctgtgggcggaaaaaggcccagaggcctgaggccctggaacccaacgggggctggaacaggctggagggacaggtgcaagcagccagggcccccaggggatggactgggagatggcgaggacttggggtgattagcaaggtttggggcttctgggcttagaagttaggcagtccagggaggcacaaggccggggtcagtggcaggcaacaggggctgagacggcagagatcactcactgcacttcgggcttgccactggcctcacacttgaggctgatgtcatctgtggggaagacaaccaggcgccgtggagactgttccgtgatgacaggtggctccatcactgaagacagggtggagagagcggtggtgagggtgctgcctggctggtgtcatagcctcagcacctgtcccatcgtgagggaagcagggtccagagcccctggaggccccatggccacagggggacgaacggaggggaagaacaaaagaggcttgtgggacatgaaaagagggagagaggggacagccacgtaagttacaaagagatgcctgagaaagacaaaaagggtatgacagaaagaagcgggggcaacaaaagccaagacacagaaaccaagaaggacaaaccccagacaggggagaagggaccagagagaatggcagagaggaacagtgagggtgacagagtacccaggctggggcagagacagaacaaagccagccccacacaggtgagagaagcacatggtgctcagggagagccgagcagggccccggcactcaggagggcgggggtgcaggctcagctgagggcctccttacccttctccttggccttctgggaaacactctcacccctccccaacttaccatggtgtccttcatctgagaaatccaggcaggcagcaagggagggaatggagagaaatactgacaggcagccccagagtggggcagatggcaggggacatagtaagctcctgcagcccccccgtggagagggaatggcaggagaggaggccctggcagtggcaacaagggggcacacgctgggctggagcagtggcaggtcaagcccagggagatgggacagagagatgcccagggagaggagctccactggatagacacacagggcatgtagcccagaggcagccaggccatgcctccagctctagcagacagggagagagaaattcttgcctttaacaaggagtgtccttgcagccccctggcagggcctggcagggcctgcagaactgaccccacccattcaggatgccttggaaggcaccgtcccctgctccagcctgcttccctcctaatccaattagcacagctgagtgttttcaattaccagggcccagccttcagagccctgctgccccctccccctgaaaactatcccaaaggccctgctgcctctgagtttccatagcctgcggggttggcgccagccctcctcttctccctccttcctcccagacagccaccaagctctctggggcagaggccagagctgctgtcccagccccaggactctgcagagcactggccagggcggcctcgaggaagggagaagagggagggagggagcagcaggctgcctctgaaagctttgtctctgcagaagacctcagtgtgaaggtccagggagggaggagggggctccctggggacactgcagagggccctgagctggggagggagatggtgacagggatgacaggatgcagaaagccaactaggtggaggaagcaggaaaagagacaaagggggctggagtggctggggagggagagatggaagacaggttccaacagggagggccggctgcctgccactgcccactgtgtcgtatcagggtcaagaacaagtgctggtcagtgaccagggcagccttggagctgccatggccttttggcctagttctctctccccactcccatctttctgtagagaatgcacggcttgcattccactgtacagtgttatattgtgtatccacctctgtgtcctctgggtctaaaagcctcactggtgtgtgtttccacctgtgtggcctctcagcggctctgctccttcatccctgcacctgccttgtcttcatgcacctgtgtgcatgtgtccatgtgcatctgtaccaagggagtctgcctggccctggccctccatgtatgtgtctaaggggccagcccctttacctcctccaagccctcactgcctcccaacgccaggtgcctccccagcctctctctcgcagcccctgtcccactgctggcacagacagtcttcccaacccctatccgccaactcgtctctcagtgacactggcctcctccttgtccaggcccagagacaaaggtgtcaaggtgaggctgggaagggactggagcctggtagctcaagagacacaaatgccctcacacatgataccctgtgacatgcccctcacacggcctgacagctacttacaggagaaaacaccatcacggtaacaccccccacacgcaagtgtgtacttacattcagccccactcacacatacacatgacccaatgcaatcaaatgtcgtggtcaaatacctcccgacctccacaagcctggccagtaagtaacagagtgactcacacagtcacccatgtaaggaagtcaaaatcacattcacgaatatctacgctcagtcaatcacaagaacacacagacatacacagtgtatccatgcttaatcacaaccctacggccacactccccaacatccactcacctgcttgtgcccccaacaaatgttacaaccatagacacatgctccagcagccctgcccccacccccaccaaataactacacacaaaaaagggtccagaaggctgctgggctgggaccagggtttttcaagccaccttttcctgtctcagttcagagacagggtgaccaagggcccaggaggggaaagagaaatggggacaagacttgaacacaggcctttgcacaagccagctgagggctggggacgaccccattctcctgctgccacacccctgtggtgggggatggaagcggaggagtcggagtggggcgggcagagatggggcgggctaaggagagcatggaggaggcccaagacctcggggccctgctccaggttcgctgtccctggtgctgaaatcgccccggcggccgcgcctgtccctgtccatggtcctgacacgccccgcaccttctaccctgcccttctctccgggggtacccaacgtcctggctatctcctgcccaccctgtgcccaggaaaggccagggagaggagtcagggtccggaacagggagaaggtgaggaggtagaagataaagaggggcccaacatagcggcgaaggtaggcgcccaggctcccttcagctactcacattcctcggggatctggataagcaggcaggggctgcagaggaggagaggccacacgtaccgcagcgccacgaccatctttcccggcggcaccgcgcagcacagccagccgggctcggttcaggctccggccggaggggaagggggctggtgggcggcttggggcgggagttgggagtgggggcactgggagaggggagaagggaagggaagggtgggggaagagagacgagagaacggaaggacgttagtgactaacatctgggtaagcccgggctcttggccccgccctcagccccgcccccagctggccggcttctccagccctcccctccccatccgcacccctccccaccttggagggagaaatctggaagagatagccctggctgggcctctaggttgccttttattccctctctactctctgtctgcacctttcctgccagctgccttcccagcaccaacttgttgccccatcagctcccctgtgcatggcatgcacatccccgtatgtgtctgcatgtgcaggtgtccgtgggcatgtgtgtggttgtggatctgcaagcagggagtgagctgtatgtgagctggtatttctgtggtgtgtcttctctgggaggggttgcactcatgagtgggtgtgttagtgtgtgtgcctgagggaatcaacacacaagtctgctagctacgtgtgtcttcttgtatgtctttatgtatctgtggggatgaatccctgtatctattatctctgtgtgcacacacatgtagagaagaattcttcttgcagtcacattgctatagctttcagagccaactgatgcctgggtgctgtacagacctaaaaagctaatggggggattgggaagtgggatagagaagggaggaaaggggcccaagatggcagcatttcacaaaatagtttcaggaaaatgaagaaagaatggggaaagggccaggcgtggtggctcacgcctgtaatcccagtagtttgggaggctgaggtgggtggatctcttgaggttgggagtttgagaccagcctggccaacatggcggaaccccgtctctactaaaaatacaaaaagaaaaaaaattagccttggtggtgggcgcctgtaatgccagctacttgggaggctgaggcatgagaatcacttgagcctgagaggcggaggttgcagtgagccaagatcgtgccactgccccccagcctgggtgatggagtgagactctgtctaaaaaaataaataaaaataaaaataaaaggccaggcacagtggctcatgcctgtaatcccagcactttgggaggccgaggtgggtggatcacctgaagtcaggagttcaaaaccagccaggccaacatggtgaaaccctgtctctagtaaaaatacaaaattagggctgggcgtggtggctcacgcctgtaatcccagcactttgggaggctgaggcaggcggatcatgaggtcagcagtttgagaccagcctggccaacatggtgaaatcctgtctctactaaaaatacaaaaaaaaaaaaaaaaaaaaaaaaaaaagccaggcgtggtggctcatgcctgtaatcccagctactcaggaggctgaggcaggagaatcacttgaacccaggaggcagaggttgcggtgagcggagattgcgccattgtactccagcctgggtgacagagcaagactctgtctcaaaaaaaaaaaaaaagttagcctggcgtggtggtgcattcctgtaatcccagctacttgggaggctgaggcaggagaatctcttgaacccaggaggcggaagttgcagtgagccaagatcgcaccattgcactccagcctgggcaacaagagcgaaactccatctcaaaaaaaagagagaaagaatggggaaggaagccttcccttgagaactggtgtgggagaagagaggaaggaggaaaacaaccccctgctgctcctcagccccctgggggtcaagagaggccactgaggcctcctcccttccagatgctccaggttagggtcaggacaggggtcaggacaagctctgggacattttccgtgacagtgtttctaacacttcttgtgtgtctcaaagtcccaatttctaggtctttgtctgagtcttcagagctcaactgctgcatgtgtccaccccaaacccaagccacaccggccatgtccatattcacctacaagtaaggggagccaaagactaagggtctgaaagagggggctcctctgacaatgacaagaggaaacagactcccaagtggccagaccacttcaattccaaacaggaagtggttaaagtgcaggcaaggcaagaaagggtgttgttaggtgacagagcttggaggctgaagtcccagactagacgccttcattaaatccatactgtgcatcctccctctgcccagccaggaccttatcaaagcgggcaccgagcctcagcaggaacaccgaaaggatggtagagaagtcagccatgctgtgctaaggctctgggccttgtcagttttgtgtaacagagtgacccaagaagagctgtgaatgcggcagatcccgtggggactctgggcaagagcttgctgcagagggtggtggagaagcagcagggtgggtcagcgtgcatggcctggaggccaagagatgacttggagggtaagaagagtgattcccagcctgcaagagctggacctgggcccagaagggaagagcaacagtggatctgttccaccccggcctctccctacaaagccagtggatcaggggaggccccaggcagcactggcctcaacttcaaggcctgtaggagcagtaggagactcggatcagagagcagatgatcaaacagcagccttgggagctctgagcactggtcttaggagggggaggggaggaaaccggagcaaggaaaagctcaaagaaggaccctcctgcatgtcagaggcttttgggtgctctggaggtcgataatttctgccacgcaagttcctctatttgtcctccaaatctagaatcctggaatggtgtttggcatgtacgctcaggggaaatacaatatccccaaacccctggtccccgctccctgccccatcccagccccatcccatctccccacaggctcatatccaacttcttttttggtctcccagtatttgccacctagcttgccaccgccctgggcagtcggagacaggcaggaagcagccagaaggttgcgagatataacagctgggagggggcgctccctcctctcctcccactgctgctgggtctctgatctctcaccattcctcaggcaattacagagcaagcagctagggttgtcagctcagcaggccctctaccccccaccagcaccactaagggcaaaggagcggggaggggggagtgttccacagatggagccaaggccgggtctgccaagggtgacagacagagtgagaagaggcaggggggagcaggagacaaagacagacgtaggaagacagcgctaaccacgatggagatggttagggggtggggaaattccgaaacggagacccaggcagcagagaaagggagagaagaggaaaccggagcacaaagggtgagaggcagctgcagagtgcgccgctgagaaatggcagaaagagcgagaagagtgaggggtgggggtgggcgtgtgcacgtgcgcgtgcgcgcaggccgcctgcacagcgtccttgtccctgggggctgtgccaggcaaggggcggggaggagggaagatgggcctgggtcagtggaggggcttcccggcgtggacgtcacgctggcctgggagcagggtagagagacagacagagggtggagcagctgtgagctggggccggaggcctacaaagccccacgcaacagagcatcaagccctgcccacttgtggcactgggcaagggacggccgtgagacaggatgaatggcacactgctggctgacccatgccatgccagggaacaggtgggggtcgggggattcctgctgcgggtaggaacggggggagggggaagcacccagaaaatcccagggaagccttccaatattgctgctggctgggagtaagtggtcacctggctggaggagacgcacatgtgttaggccaagagtgagcctgcgtgaccatgcactgagtggacagtggccgctgtgctggggcagttgaagatggggccattcctgagtaagtccggtcccaaacccatcctccccggtgggaaagggccagggaggcaagggtcacgcccagcagcctacagggaggggttcagccccagaagagccttgccccatcccaccccacctggcctcccactacacccgcaggtccctcagggagtcctctgtcctctgctccaaagtgcctgctttggtctgatgggaagcagcttgccagggagggacctgggaggttgtggagcctggctagacctggagtgactgcctcctccctgaaaacacacacacacaccccatcaccaccaccaccacacaccttgagaagggaacctccagcggtgccctgcacatgtgccctgcacacctgcctgtcagttctcaggttctgcctggagttcctctcaaaggagaagcaacaagagagcccttcaacagcacagcagagactatccggcttctcctgcccttgtctcctggggacatggtgcctggtgactcagtgggccagagtgggggtggggctgggggctcagcacagggcacatgaaagggtcagagtgtggtgctgggcccatgtgcttgcaggcctgggagcctggggggcttctgtgcctgttggtgtgtatacgatggtgtgggtgtcacctacaccctgtgcactgtgtccctttaaggctcccgctggccctccccgccccgctccccaggccgtggctggcgggtttctatggtgatgcagcccaagtcccagaggtgggggaagccagaggaaagccttgttatgtgttatgtagacagcacataaagggggctgctccagggagcccccacaggtacctgggggcccagaagtcctttatgactgctgcttagtccctgcactcccaacctcacccctccctaagagggtacccttaggagagagtgagccctcagccccctcatctcgcctgaggcttcagtctccaaggcaactacaactcacctgtaatggaccattctccttaaaagatggggaaaagagacggaggttaaccctttgtggggttcagggaggacggtcttgactactggggaagggagggaggagccccactccatccccacaatcacatgcctctgtggtctgttctattaaatcaacttacagcgtggacttaccacgtaccagaaagcctcatgagcacttccactcacatccactcatctcctccccagatttgcctcagggagggaggtgctatcatcatccccattttacagatgaggacacggaggctcagaaaactggaaactgtgtccaagatcacagagctggcactgggtctcagcaggggtggggttttagagggcgtggtggctccctaagctgcctctcagaggctctggcatcccaacatgtgtgcctgctgggcttcccagggaaccaggggcctgggcgaggatggcctccaagccatcctgccccgtggggagggcttacttgccaggcagatggcaggcaaatgtcgggggcagggagtgacatcttgggatggaggccatgcggaagtaggatgtgatcaacatcacgtctcagcacagagctgaagcccgacaccaaacaaacccccaagtcccccatccaggtactcagtccaagagaaggccaactcctttcccttttgggcttggggacaggctggtttcttggtcccctcttctgctctctggaatctggacttgttctgatacctttcttgcaaccagaggctccagaacccctcccaaagaggcccctctccaatcagcatttagggacagcagtggccccattcttgtgtcgaaggagatactgatgcccagcaggcggcaaggcttcagcctccgagaaccctagaaggcgagagaaatgaggtggcagaaaactagggctcctctcaggccccaggcctcctcagggagctaggatgaccctagcactagagggggcttcagcggccaggccagaaggaacagactgcatccagttcctggggctgtggcctgaaaaggagagcagggaaggagcccagcctggggcagggagaggccctggcccacagcagtcctgggatacctagcctgtgttggtttgcggggggcggggtgggggtgcctggaaacagctcagacactgccaggccccacgggccccctccaggggccccactcccgaggggttaaagggcagagggggacacaggaagcccgggggcggacaatggggcctctgtgatccccagggcttgggcattcctaagtcatgaacacagacgcagatggctgggagacagggccacagggaacccccctccactgaagcacagcctgggttggccagaggctctgtccccatccagccactgcagcagccaccctcagccccaccccttcccagcacaggccctgttggggcatctgaggagacccacgtggcctcatgacaatatgtgtgtgcatgctggttcacgaacacacacacacatgcaaccaaatatatgaccccacccagacaaacaggaatactggaggttacacacacacaaatacacacacacaagcagagacacaaaccccatacatgcagataggaagtctgcctggctggagggcagggggcagaggggctcccgggactcagtccctttccctcaagttccactctcagacccgcactgggatggacgggttcagaagtcctctttggccaagtgcatggagcccaggacgctgccaccctcctgccccacccaacccctggccctcgcagctgcccctgctgggtgtaagggccagagatgagcaggagctgctgactgacagtggctgggcactccctctgcagctttccaacctgggaagaacacggggacctgggctgggggccactggacaaagaaaagcttctagaaagaacagcggccagaccctccccagctcctccctctttttccagccacagccttcaggaagccacaaagaccctgttgatatctggggaagaggcaagctgggcgggctacctcccccagtgctcgtctggctgctgctcaccaggcaccccccatacagccttccactcagacaaggcccccatggggggtctgggcccaaccccaaggcgtagagtccagcagaagggtgctgagtggctgctggacagggcacaacctcagggccctcaagggtgaggcaggggcagctgggggggacaaggagaggagcagagcggtggaagacagacaaaagggtaagcagagagatggagcagagccctgacgggaagggggaagagggaagggagggccaggcaggcagaggcagagggaggagacggggagtggtgcaccccatccccggcagcagcaggcttctgcctagaaggaggaggaaggtgatggccctgggggtggggcacagggagacgtgggaggctgcagaggagagagcaggggggcgggggaagcaggagaaggaggtgtccgagatgggccagatcagagcaagtaagacagcgactgcaggggcagggatgctgcaggcccattccagatggccccacccagggacccagccccagcccattgcaggggcagaggacagggcaatgagcaccctgctggggaccctagaagggcatccagaccccccgcctcccccactgtctgaaccacgggggagggaggcagggcccccactcatgcccccactcatgcctggcagaccagggtcttggctgggatccccatcctggcagacctcctcacaggaccccaccactaccccaggttctcccatgaacgtgccctcctggagcctgggccactctgcgaggccgcatcaccctcacacccagaaaagcactcagtgcagccatttcgagctttgaaagggaacttggtgatcaaggtagggcacacaggcctgtctcctcgaccctcacctgccagtcctggccaggtgcatgccaaggaaggcgccagctgtagttccagtggtggaaagggctcggacctgggagaggccgattgggggcacaatctgggcaccctgctcactgtaggagccctcaggccaggcccttcctcactctttgcctcccttttcccttcagataatcatcaagaaaaaagaaaacaagtgacaccccacgaagacagggacaatgctggtccagtttgtcactggctcttccatgggcagcccagagcccggcccaaaggagcactggccatgagcagctgcccagtacacgactgcccatcgtgggatcctgagcgcctgggtagggaagctcttcactggctgcagggcaggggaccccgccaccttgaagcgctgattgtcctcctgatgctcagcagggagctggcagctgggaacttggggaggagccttttaggagcgcggtgtagcaaaccagggaggctggggcgtgctgaacgtgtttccctcttggtgatcagatcactagcgattcttaatttcttttgttcttttctgtatatttcaagtgtcctacaataagatgtattactttcgggatcatacacacacaaacatcaataaatatggagagagactcagatgcagcagagagaaatgaccaggagccaaggaggtgggaaggtcccaggcccaaccctgccccaaacttcccatgtggccaagacagccgagtcctcaaaggctctggagccctcaggtgtgcacatgtgggcactgcatgggagctgtgccaggggagaggccaggctgggccaagtcccaccacctgcagcaaggagctgacgggaggggagaggccctggggaggcccccgccccagaaagatgatgctgggcagcagcccccaggggaagaagggcggactgcactgatttacgtcagggccacatgagtcagcagagatggcactgggctgccccgatgcccctgccctcagggtggggttaacaggggcagggtatctacctggggggtgccaggcccccactccttctggagaagggggcagatggctctaggcctgccttcctgagagggacagtgataggtggggggtccagataccctgtcgggggcaatggattgtagtgcgtgttctttgcaatccctgccaaccaagaggccccaaaagtctgacctggaatggagggaataggaatcgctgacccctcccataaccgcacagagataggaagatgtggcagtgggcaaaagacctgcagtgcgcagggaccgcctgagccagtgaggcccaccttccctcacccctacctgatggaccctacctgatggacacccatgcacgggaggcacagcagtgggtgcccgaaccgacctcacccactccagccctgactggccacagagcctgtggaaacgggctccagaggcgccctacgcctccggggaggagcccctggctctgcggcaggttttcgggtgagcccggaggagcccaggctgggatttggaaagaagaaggaggagaacaaagcccccccaaccttggggcggaggggcaggcagcgcccagtcccgttcactcccctccccccattgcaggggcggcttatcccgatctacccctcaccacgctgtcagccgggattttcaaccaaactgagctctcggctggggatgaggggcagccacgcccagggccacaccccacggcggcctgtgggggagcgctcgacccgatctggcttcctttctcagacacgcacacacgcacggggacccgccaacttcagcccccgcctgcccacacagaccctgcctgacgccccccgccctgttctcccgcccaggccagcatctggggccccgcagggtacccctcacctgtagggctcgggcacccggcatccctcccccgccccgcttacagcccgcggtgcccggagcccgacgcccggcatgggtggggctccggcagcaacgccggttaccgcgggccggaccgggccgggcggactccctggtccgtgcaccccgggcagagcggggtggggtcgccgggggatcgcggccgcggcccgggtcgcacggggaggccagcccgccttacctgcgctgcggacaccgctcgggctgcccgcccagcctccgcgcacgccggcctcggacccgccgcccgagcgcgtctgcgatgccgatgctgcggcagcagcggctgtggcggggcggggcgggcgtgcgcgcaggggcgggggaggggagcgccggggaggagagggagggaggagtgagatcacctccccggccgcccgccccgccccgccccgccccgccgcaccctagcccctggtgccagccgagcgcggcttgggctgggggcccccgggcagcccactccgggagctcagcgggaccccagccgacgggtcccgccagacccccttccccgcagaccgggagtctccggccggagagtgtcctcagccccagcgcaagggagcccgctgtgaaagctcggagcgggaatcgcggggcgagagtgctcccagaggcctggggccgggcggtggagagaggagtccggcaaggaaggggatgctcccttagcctcggcctggccctcgacggcgccggccagcgatgggcacctgcacgcaacgcccccccaacacacacacacagggcaggactcccgggacctctcccgaatgccccccgatcctgagggcccagtcagggtcctgttgggaggggtgcgggggcttcgtcctcagcgtgttggggaggcgccgcggagcaccggctcctgcgcaccccagagcccaggtgggcggcagggtaggaggcgagcccaggggagacagggtctgggagagggtatccctcgaactgccacccccaactcccagattttcctccagctctctggtgtcttatttctttgtcctcgggattggccccattcgacctttcccgccgactccactctctcccactctcccccgcagccctgcacaggatcgagaaggaaggagctcctccccagtgccccctcctaggctcaaggccatgacctcacaggcgaggaagcaaaatggagggggtaagaattccggagccggcgagctggctgcagcctcagggctaggaaggcctagggccccgatggcagattgcagatctggcggccacggtatttttatgggcatgcctgttgcccagtgaagcattccaggggccctcgactcagtctcacaagactccccaagtggtgtggggccctggagggcccacatgggagcagccctggcatcctggcttggatgccccacccccatagtgccagcttcagttcccctggaatgggaagcttggggtggacccatctgtgctcagagagggtctggatgccatgtttgcccagcctttaggaggagaatggacaagactaggcacctgagtgaagacggacggctagggagactgcttccagagtgggggcacttgcagggcatcttcaggtgacagcagaggaaactgagcccgcctgggtcacgaggccagcaggctcatgagctgggccaagagggcgtactttccatgaggcactgagctgtggtcagcttcctgcctttgctgatctgaactctgataggcctctctcctttccagttgctgcctccactcactccctacgttcccagcctttcctccaagccccaacttctgcaaatcctttacctaatctagggtttgatgcccatcaggatggtgaagtaagcagggaatagagcccgtttatacgcacctgctaatgtgtagtgatgggtccatttatggtaacaaaaaattcattactaggattacacgacatcacatttcctgagcacagccatggacctgccatcgttacatttcctgcacatttaaattgcacaccaacctggggaggtctgttgaagcattcgccccacgttacagatgagaaaaccaaagcccacagagctcaaggctgggtccagcaagcacagttaggaaggtctctttctctccactggctcattgcatccacacacacaccccagatgatggtgctgttattatcctcactctcccagtgaggtacccaaggtccagagaggggcagtcatgcaaccaggaagaaattggcactatcagtgcccccatttcacagatgaggaaaccaaggttcagaggggtcaaatgacccacccaagatagcccagaaggtaaatggcagaactcggacttgaattcccttctgcttgaccacgatgcccattctcacttccatgtaatgaagtggaggagccaatgggagcaagagcaagagtgacagaagaccaagggcagagcaagtcccaggagaagcaggagggactggccctgaacaagaggcaagccacccccccactgccatgtgcttgctgttggaggttagggggacaccaagtagacagatgactgtctctttcccttcaacgtcaagtgcttctcacagccctgctccctgtgacccagccctcatagacacagtggactggacaagggaagccccagactctgaccctgtgatgagcatgcagaagacgcagaagccacagacgacagtggggcagtaaggaagtgccagcaggcaggcggggtgggctcagccagacgtgtctttctctgttctcctttcaatctttctgtgtcttcatatctcaggtgtagcgcttggaaacagcacatagttgggttttggtttggtttgattctgtctaacaattcttgtctttttaaaaatcagctttgagacctgcctgggcaacacagcgagaccacgtctctacaaaaaaaattttaaaattaggcatggtggtgcatgtctgtagtcccaactactcaggaggctgaggtgggaggatcgctggagcccaagaggttgaggctacagtgagccatgatcacaccactacactccagcctgggtgacagagtgagaccctgtctcaaaaaaaaaaaaaaaaaaatcaactttattggagtataatttacatacagtaaaattcatccttttgaggtttacagttcaaggagttttggtgaatgttgtgtgcagccaaccactcccaccaccccctgcccttggccaccactgatctgatttctgtcttttctaaattttattataaatggaatcataccgtatatattcttttgtctggcttctttcacactcacgcagcatactttttgagcttcatccatgttggtgtgtgtgtttgtgtgtgtgtgtgagagagagagagagagagcatgcgggcgagagagagcagtatatttccttttgattgccgagtagtattccattgtttggttggatcagggtttgttcagccattcactcactgaaggacacttgggtagtttccagctttgtgtgattatgatggagcagctctaaacatttatatgcaagcttgtgtaaatgtgtgtcttcatttctctaaggtaaccgcttaggagtggattgttcagtcaagtggtagattgatgttgaacctgcctttgtctttgaactgtgcaggtcagctggtcacacggtgatgactgctgctatctctggatgtagtcacgccaggtgagtatttgctttctatttgtcctgctttccccatctctctcccccacctccactttattattttttattagtgttgttattactttgagacagggtctcactctgttccctaggctggagtgcagtggtgtgatcatggctcactgcaacctcgacctcctgggctcaagtgatcctcccaccacagcctcccaagtactgggacaacagatgtgccaccaccacacttgattaatttttttttcttttttggtagaggtgaggtctcactatgttgtccagactggtcttgaactcctgggctcaagtggtgatccactgccttggcctcacaaagtgctaggattacaggagtgagtcactgcacctggcctcacccccacattgtatcagtgaaggtgtgtctggagttggttccttccagtgggttcttggtctcgctgacttcaagaatgaagccgcggaccttcgcggtgagtgttacagctcttaaaggtggcacagacccaaagtgtgagcagcagcaagatgtattgtgaagagtgaaagaacaaagcttccacagcatggaagaggacccaagcaggttgccgttgcttgtggggggcgggggggggccagcttttattcccttatttgtcccctcccatgtcctgctgattagtccattttacagagtgctgattggtccattttacagagtgctgattggtccatttacaatcctctagctagacacagaaaactggtgcgtttttacagactgctgattggtgcatttacaatcctttagctagacacagagcgctgattggtgtgtttacaatcctctagctagacagaaaagttctccaagtccccacatcacccaggaagtctagctggcttcacctctcaaaggttcagggtaggaagcagaaattcctcccgtgatcatgaacagaaagggattctgtagaagggattagatgcttacctgaccattggatgggccaaaggagtggactctgggctaggtgttgataacaccagtgcagacctggctcctcaagggagctgctacctctgccaccatccacaagatgggggattgggaggcggccagtgtaacctttgagttcaaaaagacaccaccaaagtcatgacctgaggatcagcaagctgggaccaggaagccattgctgccacaagtgcccctcaacaaccaagaagtgaaggttagaccccagaaattctttgatgtccagcagaaacgcagccccacacagcagaagtgtggcttcccttccttcagtcatccaaacttcatgtgagcacacccaatttggcaattggcaaatttgccaatttgccaattggcaaaactaaatttgcttcccaaagtccagctgctctggagtctggaacatttccagcctctgccatgcagagcccacaaggtgggagtgagtgccgagagctgtcaatatgcccaggcagatgctctgctcttggtcatcttttagatggactggatttgttctctcattctattttctcctctgtttgtttagaagtgctctatgaattttttagtagttcctctacctattttaacatgcattcttaataaagtctaaagttaactaatacctctgctctggtggttttaatgtaggtccataaattatttgatactcctgccttcaaaaggtagtgcttaattctcctcctcttgagtataggctggacttggtggctcacttttttttttttttttttgagatggagtttcgctcctgttgcccaggctggagtgcaatggtgtgatcccagcttgctgcaacctccacctcctgggttcaagcaattctcctgcctcagcctcccaagtagctgggattgcaggcgtgggccaccacgcccaactaatttttgtatttttagtagagatggggtttcaccatgttggtcagtctggtctcgaactcctgacctcaagtgatccacctacctcggcctcccaaagtgctgggattacaggtgtgtgagccaccacttttttttttttttttttgagatggagtttcactctgttgcccaggctggcatgcagtggcgtgatctcggctcactgcaacctccacctcctgggttcaagcgattctcctgcctcagccccccaagtagctgagattacaagcccccaccagcacgcccagctaatttttgtatttttagtagatacgaggtttcatcacgttggccaggctggtctcgaactcctgacctcaggtgatccgcccgcctcagcctcacaaagtgctggaatttcaggcttgagccactgtgcccggcctcatttcttttttaaattttattttagaagttgaggtcctgctctgtcactcaggctggagtgctgtggcatgttcatagctcattgcggcctcgaacttctgggctcaagtgatcctcccgcctcagcctcctcaggagctgggaccacaggcacacaccaccacacctggctcacttctgatgaaaagaataaagcggaagcaatggctgcagctgtggggactaggtcacacaggcactgctgcttcctccttgttttctctctctctctctctctctctctctctcggattgctctgttgggtgaagccaggtgccacatcgtgaggacactcaacagccctatggaggagctcacatggagagaaacaaaggtcttccgccaacaaccatgagtgtgccattttgaaaaggatcctccagccccagccaagcctttgcatgactgcagtcatggccagaatcccactgcagcctcacaagagcctttgagctagaacaatccagctaagccactcctgaatcctgacccacagagattatgagataataaatggttactgtcattttgaactactgcatttgggggtgatttggtttgcagccacagatcactaatacatcttccctcctcctacacaatgcacggcctgggataacatactagccacatgaggtgggccctattatcatgtaggaatgaggaaggcagtgagctcagatatgtggacaggaacccaggcagagtcagccgtctgagctttgggaagcctggttttcagtagctctagggacttacccacacccccacactcccacccctgaactgctattatggtgctgtagcccccacggtgcctgtcactacccaccagctgctgtcccctctcctctgtgtccatcttttcttcatgtctttgcttctcctggcattctcctgctttgtgacaaatacccgtggctttttctgcacatgtcttttggcttctaatctcactgcagtttcaattccaagagagagaaacttatgggcccaaatactcattatcctcattttggtggagccttcatgccaggtaacttcgtaggcaactaaccagcctatggactagctagtcttggccaggtgcgggctcctggtccaggcagctgaggccaaggttggttcaagctgtgtgataggcagtatggccatctgttatggacttaatgtgtgtgtacccccaaaattcgcacgttgaagtcctaacccccagatggagcagataaagaagaacagagaggctggacatgatggctcatgcctataatcccagcactttgggagaccaaggtgggcagatcacctgagtccaggagtttgagactagcctgggccacatggtgaaaccccatctctacaaaaaatacaaaaaattagccaggcatagtgacacacgcctgtagtccgttactcgggaggctgaggtgggagaatcacttgagccttggtggggaggctgtagtgagccgagattgcaccactgcactccaacctgggtgacagagtaagaccctgcctcaaaagaaaagaaagaaagagagagaaggaaagaagaaagaaagaaagaaagaaagaaagaaagaaagaaagaaagagaaagaaggaaagaaagaaagagaaagaaagaaagaaagaaagagaaagaaaagaaagagagaaagaaaaagaacacaagaaaagcactgttccctcccctccaccactgcccctaccatgtgaggacacagtgagaaggtggctgtctctaaaccaggaagacagccctcaccagaagtggaccctgccagaccttgatctgggacttccaacctccagaattgtgagaagataaatttccattgtttaagccacccagtctgtggtattttgtgatggcagctggagctgactaagacaccaccaatgggtaagtcactggctagtggtgctgctgcagcagggagtatgtcttggtgggcatcttgctcgacctctcctatctaaccacactgaagtcatgcattcccttgtttttctttatactaggcccacgaaaccccatgctttgaaaagaattgcttgtttgccttcaccactcctcctcacagcctggaggtgatcatgttactgtgtagactggtatccctagggacttatgggctccaaacaagctgcccatgaatatcacaatcctgtcacatgcccttagccagccctgcttcccttccacgcagtgcaccggctgggtgcagtggctgatgcctgtaatcccagcaccttgggagaccaaggcgggcgggtcacttgaggtcaggagttcgagaccagcctgtccaacaaggtgaaaccctgtctctactaaaagtttaaaaaaaaaaaaattagccgggcatgatggggcacctgtaatcccagctactcgggagactgaggcaggaaaaccagttgaacccaggaggcggaggttgcagtgagccgagatcatgccactacactgcatcctgggcaacagagcaagactccatcagaaagaaagaaagaaaagaaagaaaaggaaggaaggaagaaaggagaaagtgacagattaagcacatacattcactttctcttcctcatgaaatcccaccaaaatgacagtaaatgactttttaaaaagaaaaactcccaaggacagaaataatgggaaaatagaaaacagcagcaaaatcatgggagctgaatttcactgcggaacccacacgcatccagaaaatgggggtgagtatggaagtgccattaaaagtctgttgaagaggcagtcagatctccacatgcttttccccatcccaacggaacagaatgtttattctttggagatgatgaaacaaagagtgtttcaagtggggagtaccaggaacagcttagatggcaccatactaaaaatgagggggttaaataaatatttacctactgaatttggaccactttggaccctcctggcccactctgtttctcaagtgctgacaaccagcctcaggcagcaggctaaagatctatctctgggtatttggccatcccaaggtgaacgaaaaggtagtaaaattggggttctccaataaaaccagccccgctacatcatcctatgatgaagctcatagttgacatgtccttccttttcaatcagctcattagtgccccattctttttttttttttttttttgagacagagtttcgctcttgttgcccaggctggagtgcagtggcacaatctcggctcactgcaatctccacctcccggattcaagcgattctcctgcctcaggctcccaagtagctgggactacaggtgcgtaccaccatgcccagctaatttttgtatttttagtacaaacagggtttcaccatgttggccaggatggacttgatctcttgacctcaggtgatccgcccacttcggcctcccaaagtgttgggattacaggcatgagctgccatgcccagcctgccccattcttaaatatgagaagacaaccaaggatcaccagacacctgaggaaaacctttagcatgaaagcaggaaagatcaaaatcaaaacaaacaggaaaacaattgttgggaaacacgactatgagaggtaataatttttaaaactaggctgggcacggtggctcacgcctgtaatcccagcattttgggaggccgaggggggcagatcacaaggccaggagtttgagaccagcctgaccaacatggtgaaaccccgtctctaccaaaaaatacaaaaattagctgggcgtggtggcgcatgcctgtaatccaagctactcagaaagccgaggcaggagaattgcttgaacccaggaggcggggcttgcggtgagctgagattgtgccatggcactccagcctgggcgacagagcgagaatctgtctcataaaaaaatttttttaaaaagaatttttaaagctattaactcactcagggagataatagaatgtaaaaatatccatgaatcaagaataggatgctataaaaaaggaacattcagcgaacaaacaagagttttttgtggaagcatacatgaaaaattcaatagatggatatttttcttctaacaaaatacagaaagttgcaagacaacatcactcccatcctagctacaagaagctggataacctacaaatcataggattttttttcttttaaggctatcgggaagctgaggttggggggaaaaaaaatcaaaatcttgaaaagccctttctaggagaaaagagccccatagctgctttgatttttggcacagcagcagcaggaagaggaggctgccacagacttgtgtacaaaagaaacagagaaactctgaacacattttaaaaggctgagtgtgcgacggcatgaggctatagactctctaatgcctcccattcaagagagcttacattcacccactaactcttttgcatgggccttcaccaagaaagtttgaaggcaaagcaggtgggccgaaagatactctccgaggtagacatgtgctcaggctgctgaagtctggatgcaggacaagggaaccgacaggaacccccctggggctcctgaccttccactgagtacagagcagctgtaactggtgaatgaagcagggcaggaggactgaagagttcatccccaggctctaggaagtcttaaggcaggacagaagaactgaaacaaaccttccggttgattctaatccttacactgagtacaaaccagaagcgaactgtggttggagtggaggcaaaagacctacaataggcacccgggaatgtgcgctcagggatctgctgaagtctacgggtgaggcaggagaatcaaagaaactcccagccactcagatcacaagtcccaccaaagagaatgttctgatcctgctctgaaatcattcgaagtatacagaaaactgagtctacgcaaagcaacaagaaaccccagactccacttaactacacaccagcctctaatacacacacacgcatgcacacactaatggcctgacaagaagggtcatgccctttttggggcataattttatgtgtatcttccccactgttctattacatatatttaccccaggagggataaatatatatgattatttacttcttaaaatagaaataggccaggtgtggtggctcacacctgtaatcccagtactttgggaggctgaagtgggaggattgcttgagcccaggagtttgagaacagcctgggcaacatggaaagaccctgtctctataaaaatacaacaattagctgggtatggtggtacatgtctatagtcccagctactcaggaggctgagatgggaggatcccttgagcccgggaggtcgaggctgcagtgagccgtgatcatgccactgcactccagcctggctgacagagtgagaccctgccttaaaaaaaaaaaaaaaaaggaatttgggaagggctcacctgggcagtcctggcccaggtctttcatgtggtggctgtcagatggtggccctcttcatattgcctcagagccttttttttttttttttttttgagaaggtgtctcactttgttgcccaggctggagtgcagtggcggggtctcagctcactgcaacctccgcctcccgggttcaagccattctcctgcctcagcctcccgagtagctgggattacaggcgcacgccagcacacccagctaatttttgtgtttttcagtagagacagggtttcaccatgttggtcaggctggtctctatctcctgacctcttgatccacccacctcagcctcccaaagtgttgggattacacgtgtgagttactgtgcctggcctcagagccattttctgtggtccttccatgatggctgaattgggcttccttatagcatcagggaagttggaatgcttacatggtggctaaaggcttgaagagtgagtgtccctgttaacaaggcagaagctgcattaccttttctgcactagcctcagaaatcaatcagcaccacttttaccatattatcttgagtacaagaaagtcacaagcctgcccagattataggggggagggttaaattccacctcttgatggggaagtggcaaggttccaggagagcatgtgggatgggagatattgttggggctacctttgaaaaacacaatctgccacacacaccagttaaaaggcagagactgttgggctagataaaatagctatatgttatttacaagaagcacatttgaagcataaagacacagacatgttgagagtagaagtatggaaaaagatataccaagcaaccactgagcataagaaagctgccatggcatcatactaatatcaggtagagcagaattcaagacaaagagtttactagagatcaagagagacatgtcataatgaaaaaagaacacataatcaagaaaacacaaccatttcaaatatataagcacctaatctaccaaatatatgaaacaaaatttataggactaaagggttctagatacagataaatctccaaacatactggccaactttaacattcctttctcagtaaatgataaaacaaataggaaaaaaatcagaagaatatagatttgaacaacactatcaacctaattgactcaattgatatgtacggaacactacatccaacaacagcagaacacatattcttctcaagtgcagatggaaccccaaccaacacagacaacttctgggcaatcgagcaagcctcaataaattacaaagggtcaaaatcatacaaagtacgatttctgaccaaaatgatgttgaattagaaatcaacaacaaaaagacatctaggaattttctaaatattttgaaatgaaaaaatatctacttccaaataacccaagaaccaaagaagaaaccacaagtaaaattattggtagaacatatctttcactgaatagaaatgcaaataaaatatgaaaatttgggaattcaacaaaacaactgattagaggaaaaggaactacttatattagaaaagcagaaaggtcccaaaataattatttaaatttctactttaagaaactagagccggtcacggtggctcacacctgtaatcccagcactttgggaggccgaggcaggcagatcatgaggtcaagagatcgagatgatcctgaccaacatggtgaaaccccatctctactaaaaaatacaaaaattagctgggcgtggtggtgtgcacctgtaatcccagctactcaggaggctgaggcagaagaattgcttgaatctgggaggcagaagttgcagtgagccaagatcacaccactgcactccagcctgggcaacaagagcaaaacttcgtttcaaaacaaaacaaaacaaaaagatcaatgaaattgataagcctctagccagactgatcagaaaaaaaaaatggagagaagatacaaattaccaatatggagaataagagagagggggcattattacagatcctacaaacataaaaaagtgataagaggatgttgtgaaaaacttattccaatacatccaacaacttagatgaaatggacaaattccttgaaagatacaaatggtcaacgctcatttaggaaaaaatagataacctgattagccctgtatctgtcagaagagttgaatttataactgaaaaaattctcacaaagaaaactccaggtttgtgtaaataataccaattctatactaactcttccagaaaacagaaaaagagagaacacttcccaactcgttttataaagtcagcattatactcatccccaaaccaaagatattacagaaagggaaaacgtagaccagcatctctcattaatacagatgtaaaaatggtaaacaacagccaggcacagtggctcacacctgtcatcccagcactttgggaggccaaggtgggtggatcagaggtcaagagatcgagaccatcctggttaacatgatgaaaccctgtctctactaaaaacacaaaaattggccgggtgtggtggctcatgcctgtaatcccagcactttgggaggccgaggcaggtggatcacctgaggtcgggaattcgagaccagcctgaccaacatgaagaaaccccgtctctactaaaagtacaaaattagctgggcatggtggcgcttgcctgtaatcccagctacttgggaggctgaggcaagagaatctcttgaacctgggaggcgaaggttgcagtgagccaagatctcgccattgcactgcagcctgggcaacaagagtgaaactccgactcaaaaaaaaaaagaaaaaaaagaaaaaaattcaatactcacttgtgataaaagctttcagtataccgggtgacagagtgagagactatgcctcctccccaccaaaaaaaatataaaaaaaaaaaagaagttacacaaaatactatgtactcttttatttatttatttatttttattattatttttttttgagacggagtcttgctgtgtcacccaggctggagtgcaatggcaagatctcggctcactgaaacctccgcctcccgggttcaagcgattctccagcctcagcctctgagtagctgggattacaggcttgcgccaccacgcccggctaatttttgaaaatactacatactctatgattctatttatataaaattctagaaaaggaaaatctatagtgatagatcagtggttgctaggctttcaggtaggggaagaagcttgactgcaaaaggccacgagggaactttctggaatgtcgaaaatatttattctatgtcatgattgtggttgtggttacacgactgtatacatttgtcaaatcttactgaacagtacaattacaattaatgaattttactgtatgctaatcatacctcaataaagccgaaaaaaaaaaaagtcattctggaggagagaaatcattgcctgcggagggccattccagggtggtgagtgcatgagcactgaagacacccggagcagctgctgcaataatctgggggaggaacgtgcaggcagagagagcaagaggaagtcagactgggaaaccccgaggcagttacccaaacagcccactaacagcaactgcagtcggccgcctctggggaggaaagcgggaggggccactgcctttaaaaaagaaaaaaaaaaaaaatctctgcagttttgccagggagccgcctcctgcctgactctcacatgatgacctggaggccatctatgggtacggccctcaagccctcaacgctcaccctccttctaccccccgcccctcaccccagcacctgctggagaccctggccctcccttccactccgcgaggctcttaatctatccagttccatgggctgcctttccgcagctataaacaggctctgtccagctttcccagttattattcacttaggtgaatggacacaattagatgatcatccgcaggctgtcttcctgtcatcattggcacacgcacacaccctcacacacgcacacaccctcacacacgcacacaccctcacacacgcgcacaccctcacacacaacccccccaacgccacacacacacacaccacacaccctcacacacaaccacccacgccacacacacaccacacaccctcacatgcacaccctcacacaccacacaccacacacaccccacacacacgcccaccctcacatacgcacactctcacacacaccctcacacactctcacaccctcacacacgcacaccctcacacacaccctcacattcacacaagtacacttgagtttttattaaatttgtttttgtccccttcaatcccatcctccaacccgttgttcctccctatctcctgggctctaggtattctccttcgggtcacagtccctgtgagggccgttcctgttgacaggcacttggctccgtccttcccactgcccacaggctccaccatctgcacatgcacccctcccacacaatcgggggcctctttctcctcgtccttggctgcctcctctttgtcttccaccccttacaaatccttcagggccctttaaatgccttttccacctgcctgctccctctagccccgctgcccagtgttaagtgggtcgcaccatttctctcctgggtgacaggcacagcttccaccagcctccctgcctccactcttctctgcagaagcccatgtgctcctggggcagagcccaggtccttccatctctgcagccacagtgctaggccagcggcacttgcagtttggtgaatggaaggttctgatcatggggaaccggtagatagagagggacaaacagtgtccccccaatctgcctcctgtcctcttctgcccagacactaggctggaagatcaggagccacaccttggcactcacagagccctttctgcaagtcttagagggaccagtgggaggtgtgcacacaggggctgcgctggcaggagtgggggcctggcacacccccaggtagatgccctgcccgttaacgcccaagggcaggggcttgagtgactcatgtgggcctagcgtgaatcagcacagtctgcccttcttcccatgggagctgctgcccagccccatctttcttggcccccgaggggtggctgcccagggcctctctcctggcacagttccatgtagtgcctgcccatgtggctcccagttcctccccggggtcctggctgagcagaatggcactggatcctgatctggcttcttgcatcccagaggagaccgccatgcgggcccttcctccagattcttccctagtttaacaacaggaagcgaggagtccaggggggcagagattgccacgggcctggccacattgctaggggaggtcccaacctgctgctgagatccggcactgcacagcctcgttcaggcagagaaactgataaggagatggttgtctgctcaccccaaaaggttagcatggattcctcgccctagccggctttagacggagggaacaaaggctttcccaaggccctgccagtccccacccctgcccatcttaccaccgtagtctccctcaatcatcaagtcccattgcacagaaggggaagctgaggtgccaagagctggcgtggcctgttcaaggtcacactactgggcaggggccaagcaggggctggagccttgctttcctattccccagccagggtccccaaattctctgccagttgagggaagccatctcctattccactgatctgggtggcattaggaaggccttttctatgctcctagattagtgacagcatgcggttattggggacagcatgaggatgtgcatgcgctgaggagatgcagctgaagcgtcaggcctggggtgccagcactctgcagcctgcccccaaggggctctgcaaaaacatggcaaagatgcggggtgtgatgtgcacctgtgtgtgctgcgggtgtgtgcgtgtgtggtgttggctgtgcgtatgtggtgtgtatggctgtgtggtgggtacatgtgtgggtgtgtggcgtatgggagtgtgtgatgtgtgcatgtgtgtggtgtgtaatatatgtgtgcatggtgtggtgtgtgtgtggtgtggcgtatgggtgtgtggtgggtgcatgtgtgtgtggcgtgtggctgtgtgcatgtatgtatgtggtgtggtgtgtgcgctgtctctggaaaatgcccaccctgtgttcccaccaccctaacagggccgggaggggccagggtgctgccaggctctctgggcaggaagaggaggccttggccgcgggccggacttgggcctggtccgtgaggctgttttggtctctggcttcacaggcaacagagaagacagacaaacaggaagaaagcagctgccttgggctgggctgggctgggctggcctcggctgagccaagccaggcctgggtgcggggggagtggaaagagaactactgggatgggggctggagggggtgtggggacaggggaaggagagaggtgttgggggagggaggaggagggctcaggtacagggaaggtgcgtccatactcatggtatgttcaagaacatgagcgagcgtctctgtgttgtgtgtttgtggctgtgtggctgtatcatgtgaggttgtgtgtggtgggagggagcccgtgagcacacggaggtccccagcccctcttcctaggacaggtagttgcaggtggggcaggaggaagagggtgggggtgtccctggatctcacaggggttcgtgaagcctggcttggcccctgccccactcctccctttcctgtccctcgtctccggccaactgggccctaactggggaggaggaggggcctgcgtgggcctgggaggggcccagcgaaagtgttttcaccccttccttgcctgggcccagcgaggagcaggaggaccccaacttgggaagggggcgtgaagctcccatgaaaaagcagcgcagtcctgggccagacccaccgctctctggcctcagtttccccacttataaaatgggaatgctgaactaagtgacctcccagagcactgccaacccagacaatccaaccaggggggcgtggtagggtgagggtgggcgtggaggctatggcagtgggaggagggagtcctgggccgggaccagggaggccctggggaaaggaagggaaacaggaggccaggggaggcctgggggaaagggggagggggaggaagtcccctcctggccaggtcactcccagaggctgggctgggccagggcagggcagccgatggagagcagatctgagcacccagccaccttcacgccaccgcccagctgcccaggagcccagccaggtaaggggctgcgcctgcctgcccccctgcccagtccccagccctcggatggtggcctctctcggcctcggttggggcaggggagttctgcgtgtctgtctggggtgcccactcccaaacccgggactcatgggctgcctgggggatcctgggttctgtgcatccgtctgtctgaccatccctctcaatcttccctgcccaggactggccatactgccaccgacacgtgcacacacgccaacaggcatctgccatgctggcatctctataagggctccagtccagagaccctgggccattgaacttgctcctcaggcagaggctgagtccgcacatcacctccaggccctcagaacacctgccccagccccaccatgctcatggcgtccaccacttccggtaaggcttgcccctccatgagtccggtgggcagagtgggtttgacgattcagggaagcccctctttctaaagacctccttcaccctcacctctgggtgtgtctctccaggctgccaatgagtggggaggggagcacagccccacttccccgccagggctggggctggggctggggctggggctgcccttccttctggactgcatgagcctggggtgtgtatccctcataacatggctttcctggagtcccctctgctaggagccaggaagtgggtgtccggatgggggcacgggaggcaggcctgagtccccctgcacagcaccctctctaaccaggccctcttcccgactccttcccagctgtgcctgggcatccctctctgcccagcctgcccagcaacagcagccaggagaggccactggacacccgggacccgctgctagcccgggcggagctggcgctgctctccatagtctttgtggctgtggccctgagcaatggcctggtgctggcggccctagctcggcggggccggcggggccactgggcacccatacacgtcttcattggccacttgtgcctggccgacctggccgtggctctgttccaagtgctgccccagctggcctggaaggccaccgaccgcttccgtgggccagatgccctgtgtcgggccgtgaagtatctgcagatggtgggcatgtatgcctcctcctacatgatcctggccatgacgctggaccgccaccgtgccatctgccgtcccatgctggcgtaccgccatggaagtggggctcactggaaccggccggtgctagtggcttgggccttctcgctccttctcagcctgccccagctcttcatcttcgcccagcgcaacgtggaaggtggcagcggggtcactgactgctgggcctgctttgcggagccctggggccgtcgcacctatgtcacctggattgccctgatggtgttcgtggcacctaccctgggtatcgccgcctgccaggtgctcatcttccgggagattcatgccagtctggtgccagggccatcagagaggcctggggggcgccgcaggggacgccggacaggcagccccggtgagggagcccacgtgtcagcagctgtggccaagactgtgaggatgacgctagtgattgtggtcgtctatgtgctgtgctgggcacccttcttcctggtgcagctgtgggccgcgtgggacccggaggcacctctggaaggtgggtgtagccgtggctagggctgacggggccacttgggcttggccgcatgcccctgtgccccaccagccatcctgaacccaacctagatcctccacctccacaggggcgccctttgtgctactcatgttgctggccagcctcaacagctgcaccaacccctggatctatgcatctttcagcagcagcgtgtcctcagagctgcgaagcttgctctgctgtgcccggggacgcaccccacccagcctgggtccccaagatgagtcctgcaccaccgccagctcctccctggccaaggacacttcatcgtgaggagctgttgggtgtcttgcctctagaggctttgagaagctcagctgccttcctggggctggtcctgggagccactgggagggggacccgtggagaattggccagagcctgtggccccgaggctgggacactgtgtggccctggacaagccacagcccctgcctgggtctccacatccccagctgtatgaggagagcttcaggccccaggactgtgggggcccctcaggtcagctcactgagctgggtgtaggaggggctgcagcagaggcctgaggagtggcaggaaagagggagcaggtgcccccaggtgagacagcggtcccaggggcctgaaaaggaaggaccaggctggggccaggggaccttcctgtctccgcctttctaatccctccctcctcattctctccctaataaaaattggagctcattttccacatggcaaggggtctccttggatccgggtaacggtgggtgtggaggcagcacagagacatacacagactccccacacacacccacagtcacgtgcacagctctggaatccatggcgcaggcagccaagtcttcaaagctgcaggacccctggggaagctgttctcacctccagcacccacctgcccacccgagacagagagctggctcccatcggggaatcaacacgaggtctttatgaatcgccacccagccctgccaggcatctgagcaagggtacccgccacccagcagccactgatcagccttccacaaagctgcagaagagggctttccccagcatccttcctcagctgcctccaaaaggggcctgggccagggctgaggggcaggcaggatgtggagcgggcatccctgtgtgcacggccccatcccacctctctgcacagggtgaagtgcaggcaccctgcacttgctggacagggctggagagaagcaagggggctggggagagtggccggtccagcgggtagccgccgggggcacgcatctccagcagcggcacctcagtgtggcttgggggtcgtgtctaggccctgggggtgggaagctgagggtgaggctggggccccagggccccgggagaagcctttgttcctgcccaggcggctgctgggcggggcctttgggcttcggggcccaggactgggagaggtggtagatgctggcccaaggccctggcggacagaggtctttcccaagagctccttaaacacagagtccatgttctgtgccacagcctagcggaggggaaagaaagggagagtgaccagtgagttcccccgactgaccctgcccaagacccacctgagttcctcccactcccaaagcaagccctcagccaacatccccagtccctcagcctccaggtcactctcccccactttgcacctggcatccctcctgtccctgttggtgtctctgtcacagtctcctctgaggacagcaattccttggtttagcccggaagtggggacccccctcttctcgcccccactctttccctggcagagatcacagccccctgcccatggcctcagggaccgccagcgtgcggggactccccagtcaatgtcctcccatggcgtctcctggctgccctgtccctggctcccgctcctgctcctccgtgtctaccggaccctccctgggctccctgggcctgggggcttggccacacctgggacacccgcatgttcttgggctctctcctccttgggcttagcaactgtcccgcgggcttccacgttcagcccgacagtgttcacagggcccatggtacagagcacggagcagggtcccccaggttgtgcgcttgccagggccacatcttgagccttcgctctgctccttcgagagccgctgctgccccaccccaatccccaaccagccaccccctcctgcctccctgccatctgtccctttcatcctccctggcgtgccaagcgcctgccatggcaccgcctgttacctagcccagctacaaatgccagccttgaatctgccctggagtcccttgcctctaccaggtaaacagccttaactcagccctgccactccctgctctgaagctgaacatgaatcccaacgtgcaagccaggtgtcttctgtccctctcatccctgcctccgtagccgtccctctccatccccacccgccctcacatctttgccttcctgccctccacaggctctgccttgggcctgtgtgtctggcggcaggttcccttgagctaaggccagggagggcaacgactggaacctcgaggagggaggagtttggcttccaaggggaggcagagatcccccaggacagatgtccctcacctgccacacacccactctcaccttatccacctccacgtgttgctctggggaggctgggaccaagcagcgtcgtctgtgtccagagggtcccatggcctcaggtgaggtgcatggctctggcctgcaggacagacagggagcctggtgggggccctgggaagtccctgagctagctgggcagtggctcctcccatcctggggtgtggccaaggaaaggaggctggcccagtggtccccaagctcctctagagcctctccctgtcacaagctgggtcattctgtcacgtcctcatctgccaactcctcccactcccactggccaaagcctgaccccagtcccctctggcctagaacagcacacgtgtggccccctgagccccgtcttcttgctcaccggtggaccagctccgatgccaggaggccctcgggactgctcccagactcccctgcagtctgcagccctgcgcccaccacctgcttctccgtcctgcggtgggaaggaccggcctgtttcgagtgctccttccctgcacggggtccagggccagcagcctccgcgccagccaggagtggtcagagaggctctgttctctggcccagcccagaccttcagaatctaacttggggtcgggggaggggtggatgaaggggagactccgggagccctggggcctgagggcgcggctcactcacccggcgggcagcgtgatatacttgtgggggatgaggccccgcatgccgttgtgctccccccgccaccagtcgctcgaggccctctcgtgcagccgcagtacgtccccccgccggaagctcagctcctgggctgtgcggcccgtgtaggcaaagcaggccacagcctccacgaccccctccaggtctggggaggagagggggtccaagctgtgggagggggtgtggacactagggtggggacagggtggggctctctgcccatcgccctcaccatcctcctgtgcgggcatctcggcttccagctccggctcattgtccgcccccaggctctccagctgggcgtccctgaggttcagggcagagcgaggcagatgaggggggctcttctccagtggaccccccagtcccctcggcagcaccaagggtgtaccccaggcagctggcggaaggcggtgccatgcacttctcgtagacggggccaggcagcgaggtcaggggcgggaagacccgatcgggctgcactatgagcgtctgcaccagctggttcacccggccctgcagcgccaccgggtcctgcccagcgggcaccggtagcagcgtgggcccgaagcacacggccaggttgtaggggtccatcatgttctcatcgctgtactgggccaggctggggggacacgcacatcacaagcagagagcccgcaccccgagtccccctgtcccctcgacccctggcccccaccccagcactcgccccgcagcactcactggttgaggaaggtgaagaggtagcgcagaaccaccagcaccggcgcgggcagccgccacagcaggcggctcacgtgctccaccctctccgctgtggcctccagctctgtggccaaagccgcccagagagagccgcgtgagcggggctgccccagcaagtgccctaccccgccagcctcaggccccagcctcacccgaagaagccagcagctcgccgaacaggtctggggggaagagtgggggctccaggctccggaagtagagcttcagcaccccggccaccgagtccaggtcatgggcagtgcagccctccaccagtgggtcctcccctgcagatgggcgagtggtgcggtagggggaggaagctggtgacatctgcccgagcccccacccccgcccgccctgcccgtccccacctctctcgaaggcatcacggatctctgagacccggagctgggcacccgatacccggaagatgccttcatgctgcaggcctgtgggaggacaaggagctggtgggcactgagcatcttccccagcccctccaggatggcctcccatgccaggtgctgggaactgggtgctgggtgccaggacatcgggaggggctgggtcctgcttaccattgaggttgatgaagcgaatgcagctctccaccaccaggggcacaggctggcctgagctctggggacagagggtgtttacttcaccatggacacagcatgccctgtgttgtcattcaattgctttttttttttttttttttttttgagacaaggtctcactctgtcacccaggctgaagtgcactggcgtgatctcggctcactgtagcctcagcttcctgggctcaagtgatactcctgcctcaagctccccaatggtgggattacaggcatgagccaccgcaccaggctgagtgcttttattttctctgaagaacacatcatcgttgtcggcacagaggcttagcacaccgtttgttagatccactcgtaggtgtctgatatttttgatgaggttttaggcagtgccttacgttgtatttgcaaattgttgctggaatatacaaatgcaattgaattctgtacaccaatcttgaatcaagtaacatttcaaaactcaagctgggtgtggtggctcatgcctgtaatcccagcactttgggaggccaagggaggaggatcacctgaggtcagaagttcgagaccaacctgaccaacacggtgaaacctcacctctactaaaaatataaaaattagccaggtgtgatggtgcacacagctacttgggaggctgaggcatgagaatcgcttgaaccccagcaggtgggaggtgaaggttgcagggagctgagatcgtgccactgcactccagcctgggcaacagtgcaagaaccagtctcaacaaataaaaaaaaaaaaaaaaagaaagaaactcaaagtgctcgtttaaagaatctgttgattcttttgaatatgctacacgcataaccacatcactgaaaatgacgatatcagttctgatcttctggtattctccatgcctggccctctctgatgcttgcttgcttcttttcttttctttctctctcttttccttccttccttctttccttccctctctctctctctctttctttctttcactgggattacaggcacgtgccaccatgcctggctaatttttgtatttttagtagagacggggtttcaccatgttgcccaggctggtctcgaacacctgggctgaagggatctgcccacctcagcctcccaaagagctgggattacaggtgtgagccaccgtgcctggccccctctgatgctttctgatctcagtattagttttctgatctttcttgcttccccttatttcactgtccaggacccccagtaccatgctggccagaagtcgcaggggagaagctctcaatatctcgcccctaaaaatgccgctgccccaggttttctatacgttcccattactagttaaggatgctcccttcaatcagcggaggctataggggagcccaacagtggcctggaagaggcccacccagaaaaggacagttgatgactgattgagagtggaggaccctgggatcaggcagctgctccggccactgaggtgacccagagctgaagaaagatcagcatgtacaggtgggctggcatgtggggcaaagctagtacctggataaacttctccatgtctcccccaaagagtctctggttatactgggagctggggcggggctggcggctcttctggaattttctctgtgtgtactgggtcctgcagtgaatgggagctggctctgagggggccaggtgtggagaatagggtgccccaccccccaggccagccaagccggcctctaattctctgaagttattccacaatccagtgcgaaaactggggaagtgaggcccaggggattgggcagctgagctgggccccaggaagagaagagatggcggaccgtcgcagggccccagccctcagggaggactcaccaagacacctcctgctcctccttgtcacctgtggggtgggagaacattggtctgcctctcgggccaggggtcttcaaggcatcccagagagaaaggtgtggataagagccaaggacaggcgggaggggaggaccgtgggctagacagggtcctgggcaggggagaggcggggaagggggcagcactgggcccacctcgctgaagggcctcctgcagcttctcgtgcttggcctgcagcttggcgaggatgctccgtccactcagatactcctggagcttctgggcagccccaagaagagccccaagtgttagccctggcttgagcccctccctctgccccagcaatgcccccacgggtcccgcccaccagcccagccctccccaccgtgaggtagaaggtttcggtctcctgctgctggccgcgcctccggcccgcctgccggctgcctgggtctgagctggtggacttgagggactcggtggaggggctggtctggaaggaatcaagcacatccccgtcatccgaggccaccacctccagcagggcctgcagtgtcgccttcagagtcttgttcacctgcagaggagaccacaccagggtggtaagaggtgggggacagggagggagacaggaagtccaagtcagaaggaaggggccaaagggaggggggcaggcagggcagccacttccaacagcaggctgtacaggctccaggccctcgtctccctctaacccccggtgggctgcccagacctcctctgtctcaatggtctgtcggtccaggcggctctggatgttctgggctctgggcagaatctcgtcccgcagctccatttcaacgcagatctcagccacctgcagagggcggcggccagggggctaagggctgggcttgggcagtaggtgccaagatccccggggcataagggaagcaagcacccttttgtggcctggcggccgggcacaggaccaccagcccagacgctcagctgaagaatggcaggagtgaacacacgtgtccaaaccaagacttgtccacagaggttcgtggcggcaccactcatccaactgacggatggctaaactcagcgcggtctacccacagaatggaagaggattcagccacgagaaggaatgaatccacttatgtgaagtgtccagccaggcaaatccatagagacaggaagcagagtgggtgccagctggagcagtggggtgccagtggggctggagaggagaacggggagtagtggctcctttaggggtgacaaaaatgttctggaattacatggtgatggctgcacaaccaccaaattgtacactttacagtgctgaattttatggtatatgaatcgtaccttaataaaactctatttaaaacagaatggtggcccggcgcagtggctcacgcctctaatccaagcactttgggaggctgaggcggatggattatctgaactcaggagttggagaccagcctggccaacacggtgaaaccctgtctccgctaaaaatacaaaaaattaactgggcacggtggcatgcgcctgtagtcccagctacttgggaggctgaggcaggggaatcgcttgaacccgggaggcggaggttgcagtgagccaagatggagccattgcactccagcctgggcgacagagcgagacgccatctcaaaataaaataaaatgaaatagaatggtaaggaagactggggtctgagacagaacagggagagcccagccccacctcttccagggaaaggagtggacggaaaaactgctcactgtaactgggcagacataaatttccctgtggcaagatgagagcagcttgcctcatgggcagagtgggagccaacgctttagaaaggaaggaattactcttttaagcatgtagacatctagaaaattgacattacagttaaaattgagagtgaggattcagctgtggctaaacacttgccctgctctccatctccaccaagccccgccgtacaggactgcatgaaggcgcaagtcacagagtagaaagtaaggccattttgagatgggctccaacatggctgacccttgaggacatgggactcagtgaaaggagccagtcacagaaaggcccgcactgtaggattccactcctgtgaggggcctcaaaggagagccgtgaactctgtagagacggacagtggaagggtgggtgccagggctggggggtggggagttggggttgaacggggccagagcttcagtttgggaagatgaacaagttctgcggctggatggtggtgatggctgcacagcaccgtgaatgtgcttctgcccctgggccgcacacttacaaatggtgaacgtggtatgttttatgctatgtgtattctgccacacctttttttaaaagtccatctaggctggactggctcacacctgcaatcccagcactttgggaggccgaggcgggtggatcacttgagcccaggagtttgagaccagccttggcaatatggtaaaaccctgactctaccaaaaatacaaaaattaccctgtctcataacctggtctcaaaataaataaataaataagtaggttaaaaataattgtttttaaagtacaaatcttagccacgcatggtggcatgcacctatagtcccagctactcaggaggaggctcaggcaggaggatggcttgagcccaggagttggaggctgcagtgagctatgatcacaccactgtactccagcctggacaacagagccagaccctctctctagagaaaaaataagtgtatgcatactctggggaacattgaaattttatccctcctctaaactcacacgatcagcagaaaactaacaatttgctctctggaaaggatatagcagggattttggactcagggacactggtcccagatgaggaagatgagagaacacagcagccccaccatcggaagctggcctggtcctatcagcccggcctcagtgctgtcctgctgaacaccggaaatgacccagagcatcaacatcaggcaaggccactgtgtgaccttgatgggcgaagacagaaacaagaccactctgcgatcacgcatgagtgaggacaaaatcaagaacttcttccgagccacaaaatcatccctccatcctggctaatgtaagtgactgtcacttccttgcatcacttcagcctccatcactgtctctttctagataagattaatcaagacatccaatcatacaattaccctgcttccagaaggcatccaatccaggaccaagccccacttacctgggccctcccccagatcccctaaggcaagcccaagtcctctaaggcctttccactaccctctcactgagaggccccaggctccccacggagcagggctccctccagcaatggagattatagggctgttcctgctaggctttggctggagggtgtggaactaaaaccaggtagttccaaggaaatccacacagcagagtgagcccccagccctctcaccccctctcctccctagacagggtcagaagagtttctactggggaaactggccgggccaggaggaaacaccacagacacccacatttgtggggtatgtgttcaggcctcttcttaaatatgaactgatggccaagaatcaccaaacagacacgatcagcagaaaactaactatttgctctctggaaaggatatagcagggattttggactcacgaacaaaagcaagaaaatagagcaaatgcaggaacaggagaaaacaaaaaacatttcaggccgggcatggtggctcacgcctgtaatcccagcactttgggaggctgaggcaagcagatcacctgaagtcaggagttcgagacaagcctggccaacatggtgaaaccctgtctctactaaaaaataaaaataaaagggtcgggcacggtggcccacacctgtaatcccagcactttgggaggccgaggcaggcggatcacctgaggtcaggagttcaagaccagcctggacaatatggtgaaaccctgtctctacttaaaatacaaaaatcagccaggcgtggtggcgggcacctgtagtcccagctactcaggaggctgaggcaggagaattgcttgaacctgggaggcagaggttgcagtgagccgacattgcgccactgcactctagcctgggcgacagagaaagagtctgtctcaaaaaataaataaataaaataaattaaatttaaaaaattaaaaaattagccaggtgtggtggcaagtgcctgtaattccagctactcgggaggctgaggcaggagaatcacttgaacccaggaggcgaagtttgcagtgggtcaagatcgtgccactgcactccagcctgggcgacaagggggaaactccatctcaaaaaaaataaaagcttcagaaagattcaagaagtactgtattcatgaaataagaataaagggttggccgggcacagtggcacacctgtaatcccagcactttgggaggccgaggcaggccaattgcttgagcccaggagtttgagaccagcctgggcaacatggtgaaactcccttgctacaaaatatagaaaaattagcctggcgttgtagtgcaggcctgtagtcccagctacttgggaagctgagatgggaggaccagaaggttgcatctgcagtgagctgagatcacatcacacccctgcactccagccgaggggacagagtgagaccctgtttcaaaaacaaaacacaacaaaacaaaacaaagaatacagacattttcagatgtgcaaagtcaggaaacccttggtgaaggtgtcaccaaaataagggtatcaaactaagaaagctgctgccgtggaatccggaaacagagcactgggcagaagtgaagcactccagactggaaggctctgggggagggcgcagaggagaaggttgacctcacaggtgcctggtgtggaggacagtgctgggacgaggtagcgatcaactcctagcaatgggcatgttctagcaagcagcattcctgaggcaagagagttataaattccagaagaaaaggaaaaattgtccaaggaaggacatgtgatcctaatacagtacatggctcagctgccaacagtacctgttgtcatggtgatttaaacattgaatgttaatttagccaaaaattctgggataagcccactgggagaacaagatgcagggaagcgtgtggtggctgtgagagatgctggtggcactgggtcatcattggccaatggaaaatggctgcttgacaccgggaggtgggtggctgtttctgggggtgggagctgggaacgggaggggtgggttagggagcagctgtgacgccatcggaagccctggtgatgccggactcttcgtaaagttccaagtcggcccgaaaggggcccaatgtaatcccagatcattgacaatgcccatcaggataaactgctgcaggaaaaactagctcgacggagaaggataaagaagccccattccatcttactgccaagtttgtgtcacgaaatttaaaaacacagagaaaccagcctagaacaatgtatgggcagctacacggctgcctgctgcacggtttgaacagttagtgtcttgccctccttggccattgcgggggtgcacccttggagtgaggctgcaaatggaagtgggacacttctctagctgccgcactgcctgagaccatggagaacttggattcctgagcaaagtgtgggtcatgccactccactgcccaccattacagtgaaggccagagaatgccaagcccagcagggggtgaccctcacctcatccccatcatgggggtggtagtcaaagcgcagcgggggacagaagacggtagcatgcacctcgagaaccttggctttgtcccctggaggatccagggcctccacagcttcttccaggctgcccaggccctgcacttgggaggcttgggtgcggctctcagcggccgtgtagctccggagcacctgccccagggccaggtggaaccctgtgtcacagcactgaggaggaaacaaggagatgcttgggtaggtcctggagccacagcttcccagccccgaggcaccaggcaccttttcccacctgcccaccaaggactcacgtccatgaggtccaagacgtcatgcaggtagtagttactgacagcagcgttgacactagccaggctaagcaggtactcgttgcgcgcctttgtgcacttgagtttgtgctccatgaacttggcctgccgctactcaagacaatgcaagcgtgccagggtcacgcacgtggccagcccctatctctagcctttcatgtaatgcccatcgcctcccctcccactgtggacaactacacctgaactggtcaagcccagaagtcctgctgccttccccacgccacagtccacagtgtgctcagcccagtgccaggaggtgacttgattccccggctgttcacccgccacttgccttggttcgagccacaacattccccacagaagtgggggatgacacagaactattcacagatacctgatgagtggaaggtgcgcacatggcaccccaccatggagggtgcacgagaaacccagcttggagccagcacacaggtgcacagctggaagcggccacaggcctctgcgggggccagagctgagggggaacgagtaccccaaagggtagggatagatcatcaagagccatgaaacagaacctgctggcacctgggttctaaaactggcactctattttttttttattttttttttttgagacagagtctcgctctgtcgcccaggctggagtacagtggtgcaatcttagatcactgcaacctccgcctgctgtgttcaagtgattctcccgcctcagcctcccaagtagctgggatgacaggcacccgccatcatgcccggctaatttttgtatttttagtagagatggggtttcaccatgttggccacactgatcttgaactcctgacttcgtgatccacccacctcagcctcccaaaatgctaggattacaggcgtgagtcaccgcacctggctaaagctggcacgctaaccacagcagccagggagaccttcccccaacacagccaaactctgtcatttcccctaagaacacctgagatgctcgactccctcctctgctcccagagtcccagagaccatgactgtcagccacgcacagcctggcggctccatccaggcatttcccagcctccccactctctgtactgggctcacctcgaaggccctttctccgtgcgtgtcaccccatcacccaccctaagtgtcttcttgcccccctctgaaaccttacggaatggctggcagaacagcagagctgcaggggccccgctgggagcatggagaggctgcatggggctgtccagggccaggcaactgttttccccactctctcaggccctgggagccttccgtatggaatccctggaacctgatggcactgtcctgccactcctgccctcccctgcacccagccctgacttccccctcagcacagcaggtcctagttagggcccatggcccataggcctgcgtctgaggtgccctccaggcccaccttctccaccagcctccctcccttcttgagggagctcttgcggaggggccctgcctcagtggcaccagcggtggtggtggggacactccggcctgcccgcttctcctcctgccgctcggcctcccggagcttggcctcggcattcacgctctccatgtgatatgcctggtacgtcttcttggcctgcagggagacccaaagcaaggtggtgctggtgaaggccacggctgggccagcccccagccctctacccctgcccctctggaacttggacctcagagctgggcgatcccatgtgagcacttagcctaacgccctgtgcctagggagagaggcctttgcccctaggtgcgtgcttctccctgagcctggcttggggtgatgtgatggtctggcggtgttcctccccactgtgagtggcatttctccctggaccattggggcaggcccctccccagccctttcctcaccgtctggagctctgagaccacctccaggagctcatcctgcagctgctgctccagatccctgctctagaggcagaggcaagggtgagcacggcactgcccagagcggccccgccaggcactggaagctctgcccagatcaagccccatcgggggggcacacaggttcgctctgcctgctccccacctggcctccagtgccctcccagccacagtgcctcctgatcccaaagcctcgaacacttcccgtggcccaggatgagagcctcaccttcttgaccaggcgccccacgtcctctgcaatgtgactcaggcgctgggccaggggcccggccagcacctcactcagggccgcgctctcccggctctgctgccgcgtgtgctgcagcagcaccgcccagcagtgcaagggcgacaggagggacggctccttcctgggggtagaggggcactgagacctgggagcggagcttgggccctgccgtggcccccctgccagcacatcacctaccggaagctttggtgctcccggctgctccccaggcggcctccacggctggagaagcgctcggccagcttttccaggccccgggagtattccagctccacctcagcgcggcgccgcatgaactctgccagctcctgcagcaactcccgccgcagctcgccctgcagctccaggcagcgcagctgctcgctcagctgccagcgcatctctgtggggggaaccatggctcaggcctggtcagcacgccctgcctgggtcagccaggccagcgtgggatgggagaggcagaggcacacagaccccagtcccgtcggctctgagggctccttcggacccagcctaggctgagggcaagagctaagaggggaggaaagaagctaggcccctgcaggcagatctggcctcagctgtccagccgacctctgcgctgaggccaacagatggccagagccacccggttgagggggaaggggaagggtgtcccagagagaggggagagccgccccagcgccagccaggcacctttcagtttggcttcctgtctctccctcgttcctggaaagcctctgaatggtttcccctgcgacttcctttcccgccggtacccaggctccgggaggtggcagcctcccttgcaaacacacggatacacaacacacagatcacagtgctgctcagggcaagcctgcagcgatctcgcagtctcagtggctggggaagcctgccctcaggccccaggggaaaggacagtccacagtgagggctgggagccagggagagctgatccggccttgtaagtgaaagaatggggcagggagctagcccccgtcttctgaccccacttcccactcccaatcaccccccgccccacctgtgcattcccccaccctgcagagagagtcacacccagggccccatactgccggccttttgacaccctatcactggcttgatttggcaacgctgcttcccccacacaggcctgaagcaaagaagtgcctgtccagcaagtttaagcaacctgcggaagacacttttgccatctcctgagtgcccgtcccgagtaaataagatgctagctcagcttctggccagcaggctgcccacctactcatctccatccacatccccagggagggacatgaattgatgtcttcattcagcagaatgttgattatgcacccattctgtggcaggcacgttttaaatacaaaggcaaagaggtttgaccaagtgtctgccctcttggagctgggattggaatggggcacgaacacatatcagaatgcccaggagtgatgggtgcggagaagatgaacccacaaagcaagatcagagccaggggtgggtggggacagggaggacctctttttaaaggagggtggtcaagaacaagccgcatcgttggagcagaaggctggagctggctgtacgtgggcagtagggggagtccgagagaccggtagggacagatggcacagagcccggggtctgggcagagctcccagctggactccgagtgagagaggagccacagtagtggggtgatgtggtccagcttcgttttcagggccccctcacactgccaggtggagcccaggtggcagctactgtgctagtccaggcaaaagacggcaggattcagaccagcagcagcgagggaggactccgctgagaagagctcaatcccattggatttctgtcccgccagtgacttcccaggggctgttgcatggggaccctgtgggttccgcctgcccagcatccctacctcctcccctgatctcctattggagaatgtccccttcctagtctcagcccccttgactccaggtgccccagccctggctgcatgcgtcacccatccctctgtccctccactccctgcccccaccagactagccaggtgagggacccaggagcctgacccttccaattgaattactgaacaggagagctcttcccaccggcagatcaagctgggtaagtggaagcctggggcacgggacctcccgacagagcagggcagagcccacgatgccaagtgagacagatggagagtgtcttcatcctatccgaggctggcctcctgtggttaactcgtcagctccaaggccaggtggggtgggcgctaatgccatttgaaatcaggagagtcctcactgaatcagtttaacgttttgttttgattttttgttttgagacggaggatgttgcccaggctggagtacagtggtgcgatctcggctcactgcaacctccgcctcccgggttcaagcgattctcccgcctcagcctcccgagtagctgggactacaggggcgcaccaccacacccagctaatttttgtatttttagtagagacagggtttcatcatgttggccagactgggtcttgaactcctgacctcaggtgatccgcccgcctcggcctcccaaagtgctgggattacagacgtgagccaccacgcctggcccagtttaacattttttgataaaagtaaatttcatttcattccaagaaaggtgttagacaactgctcgcctcactggccctctggagcctgccctgccctgcttcccccagaggaatacaatccctggggacttatgacaactgaacagtgcagaaggaaccagcagagggaaccgctgcctttcttcatcactgccggcagcaaaagctgactggaagccatgtcctagtccagatccgggcatgcacaccggctggtgttgagcaggcaacttgtgaattgcaagtcgattgcattggtggctttcctggcagagctttcggatctcagttcagacaaactcgtcagcacaccctgtcctgacctccccctaaactagggctggccctcttccgaccccttcttggcaccgtgcactttccttccctttgtagtgcttattatcataatgcaaagtctatgtctcccccactagacccgtgagccatgtgagggcggggtggccactgacgccatttgaaatcaggggagtcctcattgaatcattgcttttactctgggtaaaaagccagggctggaggggctggagtcggggttctctctggtacagcagtatactcccagggcctgggacagcacagatgtataggaaacatctggcaaaaggagagctggaatccatgtctgcctgaattacagagctgggccccgggccccaccagcacttcctgtgagcaaggcatttggtctcacttctgctgacaagcaaaacagaagaaaagatggtctccaaaaccaccgctatgctgacctttgagaatttagggtgtcaagacagtgaccccactttgtagaatggtaggaagcttttccagggtgtgggatgcagacccagagcaagtgaggaacccttagacagtcgtgctcgaaaccccaacttttcagtgtgaaatcactgacccatatttgctgactgaagttttccaagtctttcagcttcatggcattttggggaagcaggatggagatcattacctccatctgagcaagatgatggcgaggcttggaaagctggctcaccctgtgtagtcacctcaagctggctctggacacaggctgccttttccaaaggaggactggagcatactttggtataaattgcttgcactgaataatgatgttagaacctacatctctgggttcaaaggcacttcaagggtcattgcattctacgtcctagaagttgcagtgctgtatgaccacgggcaagtcactgcacctctctgagcttgtttccgtaattggtaaaatggagtgattgagagtgatatggacgagctgctggcactgagctgctgcctctttcctttgcaagagttaccatgccctgaataagatgggcacaagctattggctaagaatttgcaaagctgatttgcatgtgatttgcacatgggtgtttatcagaacccagaggttcaatttcagaaggctgagaagccagccctgttaaatctctcaaccaagactcactgcgccagcttgacccagagacagtggccctcgcctctgctccccctcagtgctaaagggaggcaaaaggtgctgaagctccagggactgcagtggggttacggccaggtgatctccaccaatccactcacccggactcccttactcaccccccagcccaatcaagctggttgacttcactgtagctaaaatactgccttctgaggggcacgttgggtgcatctggctctcttttaccagcggccaccagtgtctccactgaaccttgggtgagaagcggtagacccaaggaggacagagaccaaaggaaggaagacaggaaagaaggaagggaaaatggcaggcggttgaggccaaatgggcgtcgggaggcaggcaaggggctcaggctccctcctccacccccgctccagaggtcgctggggagagcatcgggccctgggccagcgcggggacgcttggagctccctcacgaccttgggttctccgcaggaaacgggccgggagcgcccggcgccctctcacctttgacttgcgtctcatactcagcctgcagcccccgctcccgccgcagcttcccgtgagcggccatggcggcctcgcggccgcgccgtcgaaccccactgctcccacgcggccgtgagcgggcccggcgccgggacttgggggcgctgcggccagcaccctgcgcgggctccgcccagccccgcccccagcgcggctcccggtggggcggggcggcccagggctggcactgcccgcgaggggctcctgggggggcagggcgccccttccagccccactgtgccccggccttgccgtcccctcccattgggcctgcacctaggctgccttgtgcccaaagccccgctgccaagcagccggagcaggtgtgagagccccaacgtaagctggcatcccaggctgccatcccaccacctccagaaggctgtccctggtcaccactgccagactgtaccattcacagcggggccgctggcccactgtaccagtggccatgaacaccattgctgccccaggctctggactccccctgggttgcctccttcccccagacatccgatggggtcctcccttcccaagtcagcccccagagaggcccagggagccccagggagccttgagagctggggtgggaagttcagaggggagggggaaggaaggtcagcaccagagagcagaacctcagcagctggctgccgttccctccaggcccccttggtaggggaggagagttcagctccggttccccttctgctcagccccacaatttccccataggcggttaccacttcctgctgccggaagagactgctctgcctcccttcccctgcagctgcacctgcccgtcataggcctgaggggggcagccccctcggagtgaggtcttagctaccctgggggcaagtcttggggcccccctcatccaggggtggtggggctttcctccaccctctaccacagggcagcagcttttctccgggaaatcgggaaggcgggaggcgggaggcggttgacaagccaagcagacaactggcttcaatttggtgggagggaaatccctggggtatagatgtggggagagaggcaaggcacttgggcaccaggcgtgtgttccgaaggcgggcgtgggggcactagtgcaggggtactaggcgtgtgtgtgcacggatgtcagagtcaggctctgtgcaaatgcgggcacacatgaccttgacctgcagatctggggaggggaggctgtgcgggtacttcctgcctttcaactgtgagcaattaattctcttgcccagaaggaaaaaaacactccctcagctccccgcccccttctcccagtaccaaggcccttctcgaacacgtcgtcgtgtgtgtctgcaggacctggggcttcaaggcctgggagctagccagacccaggacctggacttccagcagctggtctcggaagtaccgatgttcgagtcctccagcgagactagagagcctgcgcccctgcccacagcgcgtacagccgcacccacactccaacctgctcctggtcgggagactcacacgtcccaccgctgcctcaggccaaggggaaccagggagccccgcctctcactagctggccccaacacatcttgcccctccatccgagccctgactggtccccaaaggtccctccacccagcagagccagccacagggctcaggcaggcaggaaaggcctcagccggtgccttcaaacgctctcttcactccttttttcactccagagctattcctaggatgccccattcagcccgtactttagggcctgagtgttgggccctggcttttagggcacttgtttggcatttaaggccctgaacgcaactgccccctgctgctccgtctatccttcgctccattgttccccttcaaagcatccaaaagccaggcagcccgcagaaggcgcggacctgcccgcatggggacggaggctcagcggccgacaggcatcgggcccgccggggacggacggcagagggcgggccgggtcccatgggcctggccggggcggaaggagggcgccgtgggcgccgtgggagcctgggacacctcccttccaccggtgccggggcgcggccgacgcagtgcgcaagcccgcccttcccccgcaccctgcgcgcgagcccagtgccgccggaccaatcagagcctgggaacgaacctcgccgcgggcttgcgaaccggaagacactgccgccaggcgcggggcgggacaggactccgcctccggcccatacaaagggaagcccacgtcttaagccaatcaacacagcctcgcccgagccgggaagcggagagctgtgggcgtgcgcagacgcgcctttccggccccggccccgccctgccgcgctctgggctccgcttccacagctgccggctgcctgctggtcacgtgcgaggcgccagccaaagagaaccgagctccaggcctgtgtggcgagttttcaacccggcggaggagcagtgtgccacctgcagtagcaggacacagagagggctcaggaatacagggcccgcccaggactagggacagtaaatgatggctttgcagccggaggggagggaagggaaaggaggaaagacacagaaacgagcgttacggttagggtgactccatgaaaaacaggattttgatatatatgtgtatatgtatatatatatgtatatatatattttttttttttgagacgggtctctgtccctggagtgtggtggcatgatcagggcccacagcaacctccacctcccgggctcaagcgatcctcctgcttcagcctcccgagtagctgggattacaggcatgcaccaccacacccgggtaagttttctatttttagtaaagatggggtttcgccatgctgcccaggctggtctccaactcctgagctcaagtgatcccgcccaccttggcctcccaaagtgctgtgattacaggcatgagccaccgcacccaacagccgcccagttttgtattttgcatgaaattgttaatgagggaatacatggctttatgcatttgtgtaaccccatagaaactgtacaacacagacaggaaacctactgtaaaccatgggctgtagtttacaataacttatcagtattggcgcatcaacaataacaaatacaccaactaatacaaaatgtcaatggggaaacgcggggaattgtactaaaaataaattattttcaaatgcaaactcaggttagggagtagactcaagaggtatcatggactcactgaccattagggtggcaggggagggaggactcaaggactgttgatggggcatctggctgggtcattactcagacaggacatttgtagataagcccaatgagcagttggatgtccacatctggagcccacgggtatgctggggagctgctgtagcccgaagcaggtgtgattagggagagaaagtctgaaggtgaaggtgggaagagaactgaaggccaccaagagtgggagccctgctgttgagctttgagcctgagcagccccggcttgtgccacaaaacacattcagcgtggccaagcagacctccaaggcagggtctctcccataagtccagggcctccttccccggggccacagctgctgaaggtcatgagactagggagtcccacctccaaagctctttccttgtactcgggcctggcaggatgctctgggtcaaaaggccaaggctcacatccccaccagaggacctggagaaacacaccctctaaatgtgcgcgcgctcacacacaaagttccccagtgccacggagcgaatttattgtgaaagctcgtggggtgaggaggggatggggcaggctctaggaggctgagtcggaggcctctgagctgtccttgacatctgtgctctctgtggtctcgctgacctcgctgaggtccttgctgtccccaccactatcctcggcagccaggcccttctcctcgcgacaggcctctcctgagctcggaggtgaattgcctttgctctccaccttgttctcgatggcacccagcaccacgtgcctgcccttctctttcagctccaggtgccgcctcagctgccaccaggaacccagggagaaacgggggcaaagagacagggcctaagtttccagacaaagggagcctggccctgtcgctggctgaggagaggggcatagtgaggcagcagggctaggcaggacacgcgggactgagtggggacacctggctggagccccagtccaccgctacctgggcttaccgactaccatggaggcccccacgacagagcgctgccccttgaccagccctgccacccgatgagccttgggcagaaccctgactcagaactacctttgagcaggcaggccacccactggtccctagacctccccacttcccttctaaaagcctcctccctctgcctctcccatcaccctccaggctgctaggcagatggcctcctctaaagcccagcctaggaaactgaggtcgtgactcctggcaacgtagccacaagagctggcatccaaagtcggtctcgcctgcagccactgtcttggggctcctgagtgccgcccccgctcgccttgcttggcttcatgcaggcgcttacctcgtcggccatctgagtgaggtcccgcttcatggcataggcgtcctccccatctgcatagtatttgggctccacttcactgatcctgggggcagagggttagagagcaaggaggaagacctgtatcccggggacaccctcctccactcctggtatcgtggctactggagcaaggtgccatgttttctccctgaaggctccatcctgagacaacaagtccagtgtgacctgccctctgttctctccagcaaaggctccaggacacagcggcccgccccacccgtcctgcccccgttctgtgtccttagcctggatactaaggatccatttctgcggtttcttgtgagctgaagccctgaattcagccttccccttccctccctgccctgcgccctgtcccttactgagctgcctcacaacagccatcagaacccaggaaagacggtgagccctgcctgagcagctctggggccgtgactacactgggcaggtgtgtgtgcagactcgcgtggccatgtccctggaaggggagctggactcaatggcctaggctggccctgccaggcctaagacatgaggattgctgacttagctataaagcaattcccaccagacatcgtcatctgggtcacagatccctcttgccagcatccagcccagaggccaccgcccttcccaacagtccctcttcttcatcccctaccaaacgggctgagtgcagttagtgtccctccacaggcagcccaccccagcttcacttgcaagcacttttttccactgtctactgggcatgccaactgccaggttctctctagtgtgctaggcacacggggcctcctggtcctcaggcagacctcccccatccactaggctgcctggccactggcccttccttcctgaatgtgcattctcctcgattctgctctctcttggattcttctaggtgcttggtcatgcttgagtcctgctcctcagcatctgctcacgccagggacccacacctctctattcccaaacattactaaacagcccgtgtgcccttcgccagcctcagccatcatgggccagagctcctccatcacaacacatggagcacgtttcagcaggcaggtgctgtctccatgccggcttttcaaccatcagccgccgagtgaatgtggaggtatcctggcagtgctggggtccacagcctcttccccacagccggcccacccccgacctggaaggcaactcagccggtctcaggtgccctgatgggccagacctgggatcaaccccagcccattagaaaaatcgagatctacttactgaaagttgagggtgttggaatagaggtgcagggcggcccggttactgcaggggaacaaggcactgctgagctgcacggatttggccagggaggggtagcacgtccaggtcttgcccctcctcctggtccctccttccccccaatcccacttcctggatcttcaccaaaagctgaggtaccccaggacccccgtcaaggcagtatctctccccctcaatcccccttccctcagcccggcttccacctcttcctgacatgcagggagacatatttggcattgaagttctctatcatggctcgagaggcctggtccatcagtttctgagccagaccgaggcgccggtgggaacgcttcacagcctggtgggagaagagcagagatggggtgagggactgggaccttgagggctgccccaactaacccccacttccacccccaccagagagcctgggtggaccttacataccaatgaggtgatatgtccatggggcacatcatctgggtcctcttccctggagagggagaaaggagaggctgcaaaggagctcagtgtaggcacagccacctccagcccccctgccatttgtagagtggacatgcactacagccccctaagaccccagctgggggagagccgggagcctcttggatcagagcagccgatcctgccaccctctgctgcctgaaaaccccaagcctgccgggtgtggggcacacgcctatagttccagctacttggcaggccggggcaagaggactgcttgagcccaggagttcgagaccagcctggacaacacttttttttgtctctacaaaaaaaaaatcaaaaaattagctggatgtggtggcgcatgcctgtggtcccagctacttgggaggcagacatgagaggatcacttgagcctgggaggttgaggctgcagtgagccatgatcatgccactgcactccagcctgggcaacagagcgagaccctgtctcaaaaaataaaaaaagaaatgagctgtcaacccacgcaaagacaaggcagaagcttaaatgtgtattactaagtgaaaaaaagccagcctgaaaaagctgtatatagtatgattccaactctgtgacatcctggaaaaggcaaaaccatgcaaacagtaaaaaatcagtggttgccacgggttaaggagagggagggatgaatgcgtggaacacagtgaaactatcctgcgataatatgaaggtggacacatgtcatttggtcaaaaccatggggcttacaacacaaagagaagtgcagtaatgtaaactatgggtttagttaataataatatatcggccaggcgcagtggctcacgcctgtaatcctagcactttgggagacagaggtgggtggaaacacctgaggtcaggaattcgagaccagcctggccaacgtagtgaaaccccattgctactgaaatatacaaaaattagccaggtgtggtggcatgtgcctgtaatcccagctactaaggaggctgaggcaggagaatcgcttgaacccagggggtggaggttgcagtgagccaagatcacgcgactgcactccagcctgggcgacagggcaagactccgtctcaaataataatagtaataataataatagtaacatatcacattcatttatcacttgtcacaagtggaccacacaaatccaacatgctactaacagaggaagctggcagggaggggatgctgaggggtgctataagaactccatgtcctttctgttcaatttttctataaactttcaactgtactgaaaagaagaagcctattcattttttttaaagcccacagaggcatccaccagacacgtgtagcttctgtcttcctccttggtgactcacattttggccaggacataccccacaatcttcccattctcgtcctcagcaatgtaagagagctggtgacaggaaaacagagtgagaaaacttcttgtcggagctagaagagccctttagagggacacaaactggacgagtggcgagttgtgtgatggctcatgacctccgggctgagtggcttggtctccccctcgccacactgtgccctgcccatacccagaaagaagacgcaaagtggggatcctgcccctattctctgctcccttcgggcgccttcttttcctttgcccctgtctgccagctgaaaacacccaggacgccaccgaccatacagccccctgggctctgacagacttgtccactccctccaagatggccagatgggattttcctcggcctgctttcccccatgcccaaattcagaagctgcccacctggggccaggaaaggccatggtagaagtagtatttcatctggtagttctcgggcaggcagaggaggttgcagtgctgcatgttcattaggtcctctggctgcagggaaggagggcagtggaacgcgctcagtctaaggcggcggtgaccacgggtgagaagcctgctccccgtcggtctgctcggccccgctccctcggggctgggcaggcactgtgacgatctgactttgcacaacgcccggagcacaggaacaggagtgggcgccccggaggtccccggagcccacccaacggaggcccgacatcacgcaaacaggagggaatcgcagccccggccccgcgccccggcctcttcggcgggctgggccagccccataggtccagcggccgcaggcacactcagggccaccgggccgggctcggccggggccctcgggagcatgcgcggcagccacccggcccggcgcccacgcggcgcggacagcctcccgccccgggcgctcaccctcgcattgcggatgttcataacggcggcggggctcgcgggtcccagcggatcgtgaaggcgcagtcagctgccgccgcgctccgaagcgacgccgggacggccggggctgggaccggagctgggctcgctgggcgacggcggaaggggcggtgcgcgccgggccggccaccggccggaagtgcacggccgccgggcccgtcctcccggccgcttggccaatgcgcgggacaggccagcgcacggggcgggccaatgcgcggagccggtcagcgcggggcgggcctgggggcggggcgggcgctgccccggagctggagccggcccctccctcggcgcgacagcccccctcccgcgagcccacagacgcgcgcacagccgcaggtggagcggactcagcctttattccgcgcctcggcaggcgggggtgggggcgggggagggggcgggggcggggcggctcagcagggcgcccagcatctcctcgcacatggctaggcaccgcggcacgtggaagcagcctgcgggtagaggcgggcaggtagtgagggccgggggcagccgagaggcgcaacccctgcggccccgccctctcccccactcacctttgaaaggacctcccttgatggagagggccaccttgccctctcggctcaggtagccaaaccattccccgtactcgggatcgcgaaactggaataacagagacagtgacagctagcgcctgcaggacccgcccagatgccactgcatcgctaccaggggtcagagcctgggttgaccccaggtgacgtggctccagaaccagcgatcttaaccgcgacactgcgtcctccacaaagatgaaagcaggggtgggcgcagcaggcaggctacaactatataaccgactgggcaaggggatgagacactgctagatggaatgaaagaactctgccctggggtgtagaaacgttgtctatcgggccgggagctgtggcttgcgcctgtaatcccagcactttcggaggccgaggcgggcggatcacctgaggtcaggagttcaagatcagcctggacaacatggtgaaacctcatctctactaaaaatacaaaattagccggacgtggtggcacgcacttgtaatcccagcagtatactcgggaggctgaggcgggagaatagcttgaacacaggaggcggaggttgcagtgagctgagatcacgccattgcgctccagcctgggtgacagagcgagactccatctcaaacaaacaaacaaacgaacaaacaaacaaacaaaaaagttctctattgtgattgtagtcgtggttacgttgattcaaagaaacaaagaacccggccgggtgcaaaggctcacacctgtaatcccagcactttgggaggccgaggcgggcggatcacaaggtcaggagatcgagaccatcctggctaacacagtgaaatcccgtctctactaaaatacaaaaaattagccgggagtggtggcgggcacctgtagtcccagctactcgggaggctgaggcaggagaatggcgtgaacccgggaggcggagcttgcagtgagccaagatcgcgccactgcactccagcctgggcaacagagccagactccgtctcaaaaaaaaaaaaaaaaaaaggaaaagaaaagaaacaaagaaccctgatggaggcgacgacctgtcatgaaactcttaagaagtgactcccttggagctcccattcccggcttcacaggcctgtcttccagtagatgcacaatctcatctgactcctgtcctggctcaccattggtcccaaactcatctcctcctccctctgcccctgcccagtgcccattccactctctttccttctctctccactagcattccatggggcacctgtctcagggaggcttgtcagttcagccccttctcaaaaggatcatggactcaattacattgaagtccactatgaaaatgtctctttaaatggtggcccataagagttggtgtattcttctttgtaggaagtaaaactagtcctgggctgggcacagtggctcacgcctataatcccagcactttgagaggccgaggcgggaggatcacttgaggccaggagtttaagaccaggctgggaaacatagtgagaccccatctatacaaaaaaaaaattaaagaattagctgggcgtgatggcacacagctgtagtcccagctacctgggtggctgaggtggaaggatcgcttgagcccaggaggttgaggctgcactgagccatgattgtgccactgcactcagcctgggcgatagagaccctgtctcaaaaataaataaataaataaataaataaataaataaataaataaataaaaactagttctgtgtgtattcattctgtcttttgagttacattgttcaagtccttacttattttttgactgcttgacatgacacaggaaggtaaagaagaatttccttcaatgtctggatttttgccttctgtattctgttatgttggttgatgcataatgacttacctgtttttttgtttgttggttagttttttggtttttgtttttttaagacggagtttcgctcttgtcacccagactggatggagtgcagtggcgtgatcccagctcactgcaaccttcacctcccaggttccagtgattctcctgcttcagcctcctgagtagctgggattacaggcacccgccaccaagcccggctaatttatttatttattttttttattttttattttttttaatggagttttgctcctgttgcccaggctggagtgcttcccgggttcaagtgattctcctgcctcagtctccccagtagttgggattacaggcacccgccaccacacccggctaattttttgtatttttaatagagatgggggtttcaccatgtcagccaggctgttctcgaactcctgacctcaagtgatccacctgcctcggcctttcaaagtgctggaatggcaggcgtgagccaccgcgaccagcccaatttttgtatttttagtagagacggggtttcgccatgttgaccaggctggtccagaactcctgacctcaggtgatccacccgcctcagtctcccaaagtgctgagattacaggcatgagccaccatgcccagccgatttacctgttgattataacttttgtaattgtttaatgtcatctatatcttattaaaatgtattccttcaatttcatttttgagttagaactggtggcccctaacacacactctatgaatgcattaaatattaagatatagctgcaggtctaacaaccctgctgctttggaagtagtgacgaatatatgtgatacttgcagatgtctctctaactgcaatgcaatgtaaacacatctggatttctatcggtgacaaagccaggcacttctattaccaatgtggttcattgcctccactcataatggcagcaaatgctagtttcagttagaggttagtacaaataaagatgtgattctccgcccccggtttcgaagctcacagaccccagaataagatcccctgctatagtcctcgcagtaccagggttcaccagtggagtcggagtcgtggctttagaaacgcatgatgaatcttcattcattcaccacccaggccttgccaccactgggtgccatgccctttccactgggtgccatgccctttccactgggtgccatgccctttcctgtgttcagcagctcgagttgcctcctgggcagcagtcaagacagcttatcactctgctcctagcacttgggcttcagggagcccctggcttggttttcttcctgcgtcaccactgattcttgtctcctttgctgggcccccatttccctttttgcctcatagatctcagcagcatctgtactgtttttttttttttgttttttttttttttgagaccaagtcttgctcttgtcccccaggctggagtgcaatggtgcgatctcggctcactgcaacctctgcctcctgggttcaagcgattctcctgcctctgcctcccaagtagctgggattacaggcacccaccaccacgcttggctaatttttgtatttttagtagagatggggtttcaccatgttggccaggctggtcttgaactcctgacctcaggtgatccacctgcctcagtctcccaaagtgctgggattacaggcgtgagccaccgtgcccggccttttttttttgagacatagtctcgctctgttgcccagcccaggctggagtgcagtggtgtgatcataactcattgcagcctcaaactgggcttaagcagtcctcctgcctcagcctcctgagtagctaggactacaggtgtgcatgacacccagctaattttttaaaattttttgtagagaccaggtctcgttatgttgcccagactggttttgaagtcctcggttcaagcgatcctcccgtctcagcctgccaaagtgctaggattatagacatgagccactgtgccaggcagcatctacattcttgtgatactgaaaacattcatggtgagtccagatctctccgtctgaactggagactcaggaatcccactgctgctccaccagactgtgaaccctctgtccccaccagctcccacctgggccagccctcactggctgggatgacagctacagcttcctctgctgtcccagcttctgccctgttccctacagacttcccccataacaccctcccctccaagccccaggacccaggtaacaatggaatcagaccaggcagctggagtccgtcccttgcccactctgcctttatcctcccgggctgccaggcccccctgctgtgccacatgccccaccctgcccagactcccagtccctcagacacacccctgattgactcggcccctgctcagtgcttccctgctgccaccccataggaaagagcccccccacaaccctctccagtggtattattcccacagctgtcactctcaccaccacctaggtctgcttgcttacactctgctcctcccgcccccaccaccaaaattcgagctctaggagggcagaggcttcttcgttgactgaacgaacagcactggggctccggaaactctcagaccagctgagcgactgtgctcagcgagggggcaagagcgcagccgggccagactccccccattcccccattcagcctctagaggggacaaggaggcagctctcacctggcggaaggtgtactcagccacttggtagaagaggcgcagcagcacagggtccccactgtcactgtaacccatgaggaaggcaatcatggcttcactgtgtggccaccagagcttcatggcccactccagctgaggggagagcaggggcaggcatctcagcaggaaactcccctccgcaactttccagacctggctgcgtctccattggcccaagctactggaggtgaattgcgggacatctttggaagttctgaaggacccctcccagtgatatcagcttcctgacctgtagattcttgaatagacaccagggccccagacgaatggcatatatgtctgagcatcagcgtttcgccagctccctggtggcctccatatgacatggtgtcagaggtgtgtaaaccagagcaactccatcttaaacaggagctgggtcaaatgaggctgagacctactgggctgcattcccagacggctgaggcattctaagtcgcaggatgagatatgaggtcggcacaaaatacaggtcataaagaccttgctgataaaacaggttgcagtaaaggagccggccaaaacccaccaaaaccaaggtggcgacaacagtgacctctgctcgtcctcacttccaacagtttacaaatgccatggcaacgtcaggaagttaccctatatggtctaaaaaggggaggcatgaataatccaccccttgtttagcatatcatcaagaaataagcataaaaatgggcaaccagccgggtgcggtggctcacgcctataatcccagcactttgggaggctgaggcgggcggatcacctgaggtcgggagttcgagaccagcctgaccaacatggagaaaccccgtctctactaaaaatacaaaattagccaggcatggtggcccatgcctgtaatcctagctactcgggaggctagggcaggagaatcgcttgaacccgggaagcagaggttgtggtgagccgagatggcgccattgcactccagcctgggcagcaagagcaaaactccacctcaaaaaaaaaaaaaaaaaaaaaaaaaaaggcaaccagcagccctcagggctgctctgcctatggagtaaccattcttttattcctttactttcttaataaacttgctttcactttgcattgcggactcgccctgaattctttcttgggcaagatccaagaaccctccctcttctggggtctggatcacgacccctttcctgtaacactggcacagaagctgagagcaggcctctaggttccaatccagccccaggttaccctctagagaagcaaccacctccctgggcagaaagccttagaacagcgtgggtcacacatggccctgggcgctctcccacctgggtggggcagaagttatcagcatcctggaagtaaaagaggcctccgtggtcagggtcccatccggagtggaagggcaacaataggaacttgtcaatcacgtgggctcgaagttcggggtcgcctttccgaatgcaatgacggagcagaaaccagccggcttccagcgtgtggcctggtgaggggtggagtacggaagggcggggggcggggggtggggttgagggagggaacagagggagcaaaagcccctggcacctctctgctccctccctaacaatgagcgaggctctgagctccctggccctggaagcctgctcctctgcagaaacccccagccttgggaagcccatcctcgctcctctgcctcctcaaggcgcccccgccaggcactcccatatctgaagcccagaacacaaggctcagcgctcccctcctcctgggtggcccccagcccaccccgcccctcacctgggttctgctgtctccccaggcagccaggaagttccttgccaccctctgacacattctccagcacagcttgtccatccctctaccgggaaggagcagaagggaatgttgcctccagccctttcacccacccagccacccaactagaaagacccagctccggaaagcccttcctccctccctcttacccaagcccctggacctgctggcttgggtgggccaggctcagaggggcatttaaggaggggctgattcactcccttgggcctagcaagttgttgttttttttttttttttttttttttagacagagtcttgctctgtcacccaggctaaagtgcagtggccgcaatctcgactcactacaatctccacctcctgggttcatgcgattctcctgcctcagcctccctagaggctgggattacaggcatgcaccaccatgcccagctaatttttgtatttttagtagagacggggtttcactatattggccaggctggtctccaactcctgacctcaggtgatccgcccgcctcagcctcccaaactgctgggattacaggcacgagccaccgcgtccagcccgggcctaggaagatgtaatcctcacttctggcctgatcctctccagcaggggagggtgaaacattgaatggggacagacagggcgggtttcacggcccagaggcctggaagggacttgggtggggcaggaggggtctccttctgtcagggcttgcctggggctccgcatcctccctccagccctcaggccctccaccttccccaggtggggacatccccgaatctctgtctctccaggtgtgtcgagccccagggtgcccaggggagtgggggagtggaaggcctcccaccaccccagctccccaggcatcccccacctgcacgtgctgcagaatcctccgggcgcaccagtcccccagctctgcgtatttgcccgccagctcctcatctgcctccccgagctgctccaccaggttcagtagcatcatgggcaccgccatgggctccgcagccggggccccctggagctggggccggcccagtcccgacgcgtcctcctgcacccagtggacgatctgatccatcatctccaccgcttccgtctgggggtgcaggaggcaaggggaggcccaggctgaggctacatcctgtgccatccccctggacacggccctggggtgggagagccaattcctctcctgaacccagagacaccttcatccagggcctacttggggcctggcacccagcgtccagtaggggccagtcagatccgccccactctgctcccagtctgggggtgcagccccttccaggctgtggggtcagggtctggcagcacagggagcccagggaggagggaagggccttttcccagttgggggcagggcgtggatagggccctctccgtctgcgcccctgtgggggtaggggagcgttcagaggtgaaggggacttggcccacagatgggtccatgggaggggacttgcgtagtgagtgggaatgcatcaggtggccatggcagggtcgcagggtggggtcttcaggggcaccctcctctcacacacctggtaccgcacttcccctgtggctctccacagctcgttcatggccatggtgtagaaacactcactgaagatggttcgctgcaccttgaccgggcggccgtcccgagtcagcacaaaggcacacttcttgccaggaggtgccacccgggcataccgcagcaagaactcaccacctggaggttggggggttggcatgccaggggtaaggccaggacgccccgcacacaccacccttgagcctccccaagtccttcgctgcttctagatccctctaggaactccgcacatgtgccctgttgagtaaacatggacggagtcactgggagatgggcaggaagggggcacctacctgcttttgctgcgtccagaagctgagcatggcggaagcgctcgaaagtgcggtacaggcgacaatacatccatacctgcggggtacgggagggaaagtggcttaagtggccggctggggtgaggtggggagacctttgaggcgatgggccgtgtgcctgagcttccaggctgggaacaccatacctgcctcccctgcagccacacatacttgaggtcatcatacacccgcccctcgcggccaaggcacgtgaagaagcccctgtgggaaggcagggttagcaaagtctggaacgggccttgccagcccctcctgcccctctggggccagcaaatctgtgaggtgcctgagagtgagaaggggcctcaggaagggcaaaaaccctgctgaggactccagaagcacgccgagtacccgtgctcctggtcgtgggagtgctccatccagaaagccaccacgcggtccagctcctgccccacgcgctccttccaggcctgcagagtctctcgctctttctccatgtcctaggggaaatggggcttgaaggcgcagcccccacatgggacctaggcccccccagcctcgggaaccagccctcagggatctccccacctctgcacggggcttcagacgtcaccatccccgggaccctccaagacagcactccccccaagcaccccaccactggcctgtcgcgctgggagacccttgctcatccctcctgctcctctaggaagccagacagagttggtcgcggtcccgtgactgtcactcagctgacacagccgcgcccggctcaccctccccctcctcttcagggttccgctgggcctggggcggggctttgaggcccccgcacttgttcctgccgcgaccctccactcgaatgggccagtccctccagggcccctgctgggagctctggtctcaagatcctgcttggtgggaaaagctgggatggccggagggtctgggatgagggggaacggggctgccacccaccccgccctacaccaggggccccggcagggcggctgagggccttggccctaccaagcctgtggggcaggggtgcagcaggacagggaacagctagtgggcctgaatgcagaggtccctctgacctgtcaccacacagggtagacaggaggcaagttctgtttttgttgttgttgttgttgtttgtttctttgttttttgagacagtgtcctgtcgcccaggcagctcactgcagccttgacctgccaggctcaagcgatcctcccacctcagcctcctgagtaggtgggaccacaggtgtgggccaccatgcctggctaatttttgtatttttagtggagacagggttttgcaatgttgcccaggctggtctcgaactcctaagctcaagcgatcctcctgcgtcagcctcccaaagtgctgggattacaggcgtgagccaccgcacccagcctagcaagtcctctcttttgaatcagtttgtcaccaactacctcaacagtcagtaatgggcagccattggcgctaattttttttttttttttcccaagatggggtcttgctctgtcgcccaggctggagtgcagtggcatgatcttggctcactataacctccgcttcccgggtttaagcaattctcctgcctcggcctctggagtagctgggattacaggtgcctgccaccatgcctagctaattttttttttttttttttttttttttttagtagacggtttttcaccatgttggccaggctggtctcaaattcttgacctcgtgatccacctgcctcggcctcccaaagtgttggtattacaggtgtgagccaccgcgctcggccttggcactgacttctttacacaagtgacacagctctaaggccagacagtaactgcaggtaacagcccacaccccccttctctgggcctgttttccagctgcccagatctgtctgtagctctatgactgacccgatgatgctacaaggcagctgggctgaggtggttcctaccttccaggccaacagtgcacaaaatgggttccagcctctgggcgtgggtactgcactgctggtctttgatgccacagtggctgtctcagtccctgctgcaggctgacccacccaaccccaaacagttcccctttggggtgcttggtaatgaggctgatgccctggcagctggggaggcatcctctgtgtgctcccacccaccctcggcctcggctcatgctcaggggatgagctttgtgcccagccgggctgtatctacctgccctgctcacaggcctgtcatgttcacattcatgtccagcctccctcctgcctccccagactgagtggtgccctcagacggaaacgcggtattttcagataaacaccagaggcatgactgatgtggcccttgccttgtggagtgtgatgcagccgcggtgagacaagtgagctgaaggaatgcggagggtgggtagccccacaggtgccagctacagaagtggggtaggaagaagccttgtaccacccccaccaggcgaagcgcccacaacgccatttgccaaaggtatggcaaatccgcaaggcccctcggttctggggccagccccatgtggcccctggcctccaccagccccagccatgactcctaccgctctgctctgaaggacactttcccacccctctccttgggcctctgcgaggctaggctccaaggcaggtcacagttggtgcggtgggtaagacagagccatggctcctggtgtcaagccctggccagtctgcttccccccacccccacatgacacagcagaccccacaggacagaggcttcccagaagaggtcgcattcgacagggccttgcacacacacccatgccacaggtggagacacggaggctttggttactccaggagcttctggtagcggagtgcctgggtgctctgagaggaaggctgggcagtagaggtgtgtaggggaaacaaaggcaggcggcaggggcttggagggggcggggaatgcaggtgcgccaggagcaccaggccccagaagcagggtgtcactcccctcagacccgcctaggcctgtgctgctccggccaccttgccccggagctttctgggcctcctggtacaaattcagcccacgggatcccagctgtcctaccgacccagctgctaggtggtcagtctggatcacaagctcttgcttcttcccttgggggcatggctcacatttaagaggaagccagaggaagggatccacctctgcagtacccgtggtgtacttgactcagcccacctccccccaacccacccaaggaggctgccgctggtgacctgccaggcccttgccccatcctatcctctagtgcaggaggggagggagggagatctgggccccagacacaggaagtcagcagcagctgcccaaggggctctttggcccttgccctgcaaggcagctaccaagcaacctgctggaccctggtccgacttggtccaaagaccggaggccacagcagaggcctcactctggggccttctacgctttcaccagagctcaggtctccctccagggggctcccgtgagcctcgggcaggtctcagccttcccgctcaggcttcctgagaggatgccgggacacagtgagacacctagtggttatttcaaaaaaagtcttttaattgttcaaaatagcacaaaacgacatcgcactatggtaatattgagtcacaggggttactctacaatagtgaacggtgtactctcctcagaaacaaatcaataggcgcgcgagagaagggatggggtaaaacaacaggaccaggtgagtgggctccaaggtgactaaacgtgacattttccacagcgaaatatactataatacaacaaaccagaggccctggaggacacaggctgctgcgtctccaggcagaggtcggtaggggagggctggaaagattggctgctcggttcaaatccttctgacttgctggcaagccttgctcctcgacagaagtttggggtggggggcagaaaactccaagcagatcccccagcctcggagcctggcctgagttccatgctgcacagctgctgctggtggcctgctccattgccctagcctcccttgtgggtgacactacacagtcaccctcccaagctgcctccaaggacgcctggttcccctccattctccaccctttccatgacgatttgggggaggtggagcagtggctgcggaaaccagcagccctgtttgggaggcggtgccggtggtgctcagggagggggcatggggagagctggaaatccaggacaaggaggccccagccctccctcaagctcccctaggctcgaccctatagatgcggagtgatcgcccatgaggaatgagctgtccttcctttgttccagcggcctgaggacaggcaaaagggcagagggcaggggccagcaacaggaagttgggctgggtggcaaacagcaggcccctcgtggcagatttcacacctctcctgccctggctggccccagcttttcctccagaaagatccctgccaagaattagccaagaagaaaaaagtaaaaaaacaaaaacaaaacaaaacaaaacaaaaaaaagagaaaagaaaaaagattacacattctgtacacagctaacaacaacaaaaaagggacaaaaccccacacgctaaaattacaatgaaagtgtgaacttcaccaattgcaacctaaaaaacacaacaaatgcagcagttggcagtgcggcctgcagggaggtctgcacaggcgctgcccaggccgccgcggggctccttgccccttttttctttttccttcttttcttttttaaaatgggaaagaagagggggagggtagaagaggtgggagcacaaaggcctctgagaaaatgtgtaagcttcctgtggggtcactgagcagggtgggccgggggagcctgaggaagggaagttaggtgactggaaacacaaggggaagaaaagaaaacagaaccagacacccaggccagggtgccaggaaagccactctggggagggccaagagggacgcctttcctcccctccatgcctgcccccgacctggccctcaggaacgcacagccttgggagggcggagctggctgtcctcagctccgccttccctccccgcaaaagtctctccccagggtgggcggcagcggggaggaaaggaagcgcgctcctctctctgctttcccatctgcctctgcttcctcccaacagcaatggtaaaatgtgctttctttagattattttaaaaacagagagaaagagaaaggggagaggagtgaacagcggctcgcgagggtgaagtgcgaatgctgggacggggtgggaggggtgggccctggcgggtgttcctgaagcaggggggtctggagaagaatccaggggctagtcagcttcctctcactgaccatcggccttagatttctttggagcagatttccttggaaggcagaaaaaggaaagagaaagttagtgtgggccctgcaccactggaggccctgctggtgcagggccggttaggggcccccagtcatttgacaagaggctgaacccagctatttccacccctagtctcagaaggttcccgagaggggcttcctgcttacatttctggagaggacatgggccgcttgttggctggcttggtgccagagctgtctttactggtttctggaaggaacgggagagatgcgtgagcagcattgtgacagaacgagagcaaggaacacatgcgccctgcccgcctgcagagtctcttggtgccacatggcatgacccgcagctggcaagggtggggcgcctgccctatgggtggtcaccttttacgccactccttgggaccagaacacgacaccactcactcccctctggacgtaggttagaaacccactcagctcagctcccacctctcactgccctcccaggtcccagagccccaggggagctggagcaggagcatgacctgacaggaggcaggctggcctccatccctcacctgctgcactccagggacctgggacgtgctgttttcgggcctggaaacctacactttcccgccagccctctcactgcttgtcccctcaaacatcctggggtggcgtcccctgcacccccaggcccggagctgggtcccctgctctacttgatggccacccccgtggggggctgtgtgcgcgccaaaggaagcagggagacgccgcacatgggaaaaaatctcagatggtgacagttcctcctgctgcacccggcttcctgggccttccctgtgcctgaagagctccacgaaggacactcaccctgcagccacctcacttgtgtggccgggccatagcccttctcattgcgggcggcgatgcggaagatgatggcgggcttggtggtgtagtcgatgtgggcgttggaaaggctggaggactgcaccaggcaggaggggctgggcccgcagtacacccgcatgaaggccagctgggccggggtggagctcttgagctcgcccccagcctgtgagctctggatggccaggtacacggagtactcgataatcttgccggaggtcacagagggtggctcccaggtgaggtgagcaccatccggactctagaagccagggggtcagaaggtcaacagaacaggctagaggcttccagaactgactaatcatggttcccataagccattttctaacacagtagagatattccatgtggtagttcaaggagcttcaaagagatcttcccccaagtggaaggactaagacaaactgggactcaaaacctagctctcctatgcccccccccggccacctcatgtgctgaggcaggcagaaaccaaccagggacagacggccaccccacagcaagactcactttgctgattttaatggcacaaggggcccctgggaaaccaggcaggcacgtcttaaaggctgagatttcgctgaagggcccccggccacaggcattgattccggcaacacgaaacttataggctgtgcctggctgcagctcctgcttcttcagctggttatagtcagggacggtgcccaaatcatcctaggaaaagaggagtggcatgaacgccactgtggagaaggcagctctgggccaccccaggaacactgcaggtccatggtaactatgggccagagggaaaagaggtcagcggtggctggcccctcacggcaaggagggacgtggcgaggctgactgtggcccggtactggcgggaaggaaccaaagctctccttttctactgcttcaggggggatggtctctgcccaccttcctcaggcttcctggctactcagcttggcccaaagatggaggagtttcctgtaagccccgctcagggtggtggagccaagacccacccacctgaggacatcagcacctggggacacttacgtctgatgggacagcatcatctggtggcaggaaatagtgtgtcaccattacattggtgcccttaatgactcccacatcaaaccactggttttccttcttcatgggggctttgctgggtgggggcggcaggtctggcttctgcaagacagaatcggtgcgacgagatcaggccctcagcacctagaggcagtgctgccccccaggccacggactcaggagccccaacacacccgactcaccacacccagggactcgatgccattggccacttcggtcagggtagctgcagcctgcagcttggctgggctggccaccacaaccggctggggggccacaaatgtgttggatggagccaggcctaggaagaaagaaggtgtcagcgggaaagactcgggaaacctggctcccaagtgagaccgagcctcccgtcctgccctcacctccctgggtgcccccaccaccccagcaccaattcgccctcagtcgcttactctcagtggccgttgagggcagcagcgccacagtgctggggaccgtgccggccagctcattgaggcaattgctctcaatggctgggtcgttgagactgtcggcaggggccagggcctcagtggggaggtggtgatgctgctgctgggcctgggcctcctgcagctgctgctgctgcaccagggcagccagctcctgctgtgtcagcacaatgggtatggtggtggcctggccctcctgaccctcggccgacaggtgccccagctccgcctgagtcacggttgctgctgcctcggaggtgtccatgggctcgccggtgcctgctccagggtcgagagaaacactacttactaggaaggctggccagaagcgggcagcccgggcggaggcccccaaagcctgtcctagagaccccgtccacctcctaccgtgctccactgtaggctaagccctggccgaggggccctgcctgtttcccaggcgctaaccccagccagcctgttctacacggcagtctctactacttggcctgcctggggtcccctgtgctcgtcctccccatcacatctggctcatgccaccctcgagggaaatgggctcctcttcccaggctgtctccgcggcctattgctcccccgagcggcccggcttccccagggttgcaccggcactcacccatgacggcctgctgcgcggcctggagcaccgcctggatggccagggcctgggcttcctccgtggctgcggcctgggcagctgcttctgcagcagccgtcactgccagctcctcgggggtgagccccgttaccatgagggtggtggtgccagcttgggcctcggccattagctcttggggaagtgataactggtctacttcggactgtgtgggtgggggtggctggaccaccacagtggccaccaccgcagagccggcagactcctggcccgaagatggctcccctgtgctgctcagatccacggcggccgggagctcaggggtctgggaggctgacaggacctcggcggactcccccatcagggctgtggaagccgactgcagaagctgccgtggcggcagctgctggcgaggacctggcgacacctggagttcctctgggggctgcaggatgtcaacagcagagaagggcatgtcagaagtttctgtgttggctatggtcactgttattttggccgggatggggacttcagtagtcagagcccttggggcagtctcagtcattgatgagatcttctagaaagggagagaagcccctgtcagaggggaggagaggggccagagccaggcagcagggctgagaagcaagccagccctcacctttccttgtgggcctaagttttcattcttgatgggccagctccagcccatgttaaatagggaggggacagtggttctctgaccagcatgaggagaaaggcccttgagacccccggtcaggtttaacccgtcctcagtcaccctggcctggacaaatgggcactcagacccccgccatgtcttatacaggctgcggtgaagtgacacgcgatgagaaccagtcccagaaataaaagcgccccagagatgcgggggacggtgaggctcctgcctcctgccgcagcaggcaccgaggctgcccttttatggtccggaaaagggaccaggagcggccccatgcctggtacaagagcgacatctggcgtctgagtgtggaactgcacgggcgtaggccgggaaggcggggaagaacacggccccctgggctcttaccggcacagaggggcccgggaccggtgtggactgcgtcacggtggtcacagcccgcgtcagtgtggaggacacggttgtcgtgatggcactggagctggtgatgttcacgctgtcgccctgggtgctctccacctctccctgatcgctggcagcaggtggggggtctgtgggggcgacaggcaggcggctgctcagcaggagcccccccggcctgtacttggcttgaccaccacaggcttcctctaccaccaaggggagggccagataaggcaggacaggctcctggagacctctgtctgcttcaggtacagccaggacgccccagctctccccactggtaaattgggtgccaaggagcctgactggtggactctggacggacccccgccatcgttgtcttggcctttcagcctggggggctgggagaccatgaaagccaggctggccaccttcacttaccttggtttgaactcatgttggaagtgacagtggtggccgtgtgagtggtgcccgtctcgtgggtctcacagggggggttggagcacaccctctgtgttgggaaaggagccagcagcgcggtgccagcctggggggtgacgctgggtgccgccgccacctctaggccagactccacggtcctgtgggaagaagtggcgtcgggaagcagggcacccacgctgaccgacatggtggtgccagtggaagtggtctggtgtgtctcacaggggcgaccagcagggggctgctgcccaccctcgggctggcccgtgcccccgtttgaagtagcggtggtggccgtgtgggtggtgcccgtctcgtgggtctcgcatggcgggttggagcacaccctctgggcgctgcctgcattcgaggtagtggcggtgttggtggtgcctgtctcgtgggtctcacatggtgggttggagcagacttgggtcacggtggccgaggggcacagcagtgcctccagggctgtcacagtcactgtggtgctgggcgagccaccctggaggctctcgcacacaggtgccatgcggggctccccagcacccacgctggaacgggtcatggcagcggtgctgaccgcatggctgtggcgccccgcaggaaggtccttaatgcttgggctgctcagcctgactttgctgctcagaggggccaactgcacaaaagcagggctgcggcccccgggctcccgtgccatgctcggcccaaggagtgggccggccgagcacggggccccggtggccatcacagtcatggtggtgctggtcgcgctggtctggcgggtttggcactgggacttagagccctgggctgcctccagcgccccagtggccacactgatccggatcacggcaggggtgccagctgcacaggcccgacgggcatctcgctggtggttggcgccgacgctcgacatggctgtagtggcagtgttggtggtgcccgtctcgtgggtctcgcagggtgggtttgagcagccatgctgcccggccatgttggaggtggcggtggtggcggtgttggtggtgcccgtctcgtgggtctcgcagggcgggttcgaacagactcggaccacgctaccattctgctggcccacagtcgaggtcacaagagaagcagctgcctcctgtctgtcacagacgaactgcacttgggtgggctgggggtgtcccccaaggttagccacaacagtagtggtggccgtgttggtggtgccagtctcgtgggtctcacagggtgggttggagcacaccaaggtgacagtgccaggctgcacatcaccctggcctgagtcggcgatggtaactgtggcggtgggctgttctgtagtcggggaggccagaatggacacagggaggtcatgcacaggctgggcctccaccccactaggtgccgtgatcagagttacctgggtgggctgggacacgggctggggagacacacgaggaggagagttagtgctgcagctggctgtctgcctgtccctcccactgtcctgcactgtcaccacacaggctgggaccactgaccacttctcaacggccctggcagacgtaagacccactcacccctgcccccaagacactgacttgctcagaggccagggaagaggcaccactttgcctcaaaggcaactgggatgaggaagaggctgtgaggacagggcaaggggaaggcaggaggctggctgaagtcaagtcctttgtcagagaatggaaatccccctcaatgctcaaaggccaacaacaaacgtttcaccgttttccttaatatgtatgaacagaacactgcacacacatgcagacgagctgcggcgtcctgtagaacactgcgagaggaagaacccggtgttcaaacaccaggcatggccaaaccatgacagccaaaccacggactatgacacagggaccatgtgacaccagggaaaatgccccaggtgaggaaaggcctgccatggctgcacccggcagcagcgcaacaccaggaaggaaaggcctgtggacggacggcgtgagcctcacgtgcttccacttgtgtggggtccctcgcccacacgtggcctcaggccctgccctacctgcatggtgatggttggggttgtgagcccgcctgccgctgtcagcgtggtctgtgcggccgacacagtgatggcagtggggttgatcacctggcttgagagggtggcaatggtgcccaaggtggtgatgggcgtggccagggaagcactagtgctgtggccccccgccccggcaaggctggtggagacggtgcctgtcactgtgcctagggtcgtgacacctgaaggaaaggaggcaagagttgggccaaggctgctgctgtctccttcccagcagctcctcctgcacaggctggggcactctggagctgcttgcatagaaggctcgggagagaggagctgctgtgccacccagctgtgccatggggattgaaggccagccctgcttcgttataatctaggggtggcaggggacctggcctatgggtacacacctgtggtgcctttcacaaccaacgtggtgacggctggcttgacggcggagacggtgacgggtgtgaccaggcgaacaccccccatgggcacagtgcggaggatggtgcctggctgtcccggggcccccttaagcaccacctggaacaccagaggaaagtgccaccaacgtcaccaccaggctggtagatgccaccgatgctgcccctcccaggcctgtcgggaggacctgcgtggcgtgctggggtggactgcactaggacactgggctgagagacggctgggagtgcctcacctgggtcactccctgctgcccgtggccagtggcaattttggggacagcagtgatgattttcgcaggtgctccagttcctgaagtcatcaccttggtggtgatgatggtgatgggggacttgatgccaggactgctggtcacacctggatgggagagtggggcccaggggagacaggctctgtgagggctgcccctgctgcccctagactataatgaacatccacaagtcacagccatagccctgcccatctcctcactacccttagacacaaaaggcagcaaggagaagatagaaaagggtaaactaaacagaaacacagcacgccttataacccggactccatttcccctccagtgaggacttgcagacactcatatgtcgggggaggcccctacccgtggcgcccgcctgggtgatgatggccgacatggggatggttttgatgatggtggtcgtgccgggcttggtggtactgggggagacgctgctgatgcccaggatggtgggcttggtccccgccccactggcctgcgtggtagtgatgatggtggtgggcttgccatctgctgaggtcaccagcttcaggattgttcccgctggcaggggccctttggtctgaaagggggaagcaggtgcatgagccggcatcactgccaggaagggaagtgtggtctggctactctccgccggcagccttggcggctcagggaatgttctggaggctgtgggcgaggggagtgagcagcagaacttgctgagccatgtgtgctcatgggatcttccatgggcagggacatgagttcttcctgtggcctggcacccaggcccccactcttgcgtatgtgcaaagactgagagctcacctggatgatctgagtcacaggacccgtggacgcctggcctgtgactgctgaagtctgaactggtttggtctggaccaccgacatcactttgcccagattggaaatctaaaaaggaagggatggagcaaggagtgatctggaaaccaaacaagggcatggcctggctgagactctcctggagctggcccagggcggccattcaccactggcagtggccgtagcctggcagcacccatcactcaccagagcactgcctcctgggacagagatggggctcttcaccagggtgatggtcttggtgaccccgcccacaactgtggtcaccacctgggcttgctgggccactgtcacagtgcctgacttgtgcactgtgatgatagggcgggtagacgtgttggtggcggaggaaaccgatgtccccacctgggcggctgcagtcttcagcatgcgagtggcagggttgctcacctggaggaggcagagacgagtgacaggccaggcaaagaaagcgatggggaaaccacccaagatgtccacggtgggcccatagctcctgcctcaacactcaccttcctcctcctcctgctcccaagcccaagaacagcttggttcccccttcctttaacaggcaagggaggaggctgagcctgcagctctcacctgaggccatgacgcccctaatggagacagcttattctgcagcccacggtccaacggctaactctaaagcccggagggaatgactatgcttgtttgaccacagtgacaagccccggaagacgctcaccatgactggcgaggaggccaccttcacagtggctgggagggtggtagtgccaggtgtcacagccatggtcttcacgatggtggtacccgctgggacactcagcaccgtgggtgccgaggaaggggggatcttctgggtggcagcggccgcagcggccagtgcggccatcccactcatctgtgggctactgccaatcacctgcagcaggcacgggcatgtgaggccaggtcacaggtgccacccacctccctgcttggtggacctcaccggaacctgcccaggggctgccctgctcttgggagcctcatcccgccagcatggctcagctttctctactgccagaccccgctctcctggccccagacacagagggctcccaccacccaccatgcacggcaacccccgtggcaagaggcagctgggagctctggatcctttctaaagaccagagtcaggtcccgttgattctcatgggcctgtggcaagcccagctggctagatcctcctctcaggctgcaggacaagaaagtccacgtggcaaatgctcttaggatcaggcagcaggttaggccttctaggcattaacctattaattcccaccatgacctcgcaggagcgtttccccatctgcacgtcccaggagggaaaggtgtggggtgcgtggtaccagagcccgagagggatgtgaacccctcagtacacttgcaacttaatccactggatcaacaggaaatcccacccgccccagtgaccactcctcaccgttccctgggcactctgtgttggcacaaccatccgcactccggcgggaagggaggtcacggtgacaggggctttcccagcctggctggcaggtcgcatggtgaccaatggagttcctgttgtagcctgaggaccggtcactttgagaacagcagggacacctgatgagagaaggggccagccgtcagccatcaccttctgcacgatgtccccagcccctttgcaggcagccctgagccacttctgttggcctgcttgtgtgggagtctggctcttctctgtgccctgagagtgaccatttccacaggtggggccaggctttagcatccccctacaacccttggagacaagcccaaagctcccggctgctggcctgctgtctaggctgccgtctcgcagcccctacttggccgctgcctctccccggaggctagccccctactttcaaacgtccctggtcccctggctcaccttgagtcctggctgcggtgggcacagaaatggagctgccaggcaccgttggcaagacctggatggtggtggtggtcgggggtgcgggggcagcctggggcaggagcgtgatgcctacttgggtcagcggctgcacagcaggtgcggctgctgctggggcagggctcttgggagggttggcaggcacagatgggaccggattgggtgtaggggaggtggcagtagcagccgtggcaggaatgtcatatttctggagctggagaaggtagctgtcggctgttgccactgccccccagctcacctccagggagttggtgttggcgcgtaccagttgtactcgggctgggggtggtggcttttctgtgggagaacgcagttggtgagaaggggcgggaggctatgggaggaggggagtcggctgggccgggcctacctgtctctaggtaccagaggtccttgcagcagacctggttgttccaggccttgcggtagccgtcacgcccactccaaatgtacaggcgggtgttgatggcgactgcgcagtggccagcccgagcacgggggatgttgtcctccagtgtatccatcaggatggtctcccaggccatggtatctgggggagggcagacaagggaggtcagcaaggaggatggaggaaacccgccacccctggttgcccttggttcttttgttgtcaaggatgggaattaaaatcaagaagttattggattattacattaaaaacaacaaaacaaagaaaccctttgtggcaaaaagcaacacaaaaaataaaattacaaaccaccaacggccaactaagaaaaccatgagaaacacagtcagaggtttacctccttgcccgttaaagaacactacaactcacagaaagagacggcaatgggaaagtggtttagggaaaacgtgatagaaagatcttaagaaaaaacacacactctcacgcaaaagaaatctaaacttcaaccatcggcgcctggcatttttattttcaggcccgcagcagctggggctcaaggtgagccggagggggagcttcggccacccatcaggcttggcaaagagtggcctgaccattccgtgagggcaccactggaggcgcctacgtgggcacagcctctgtgcagggcagttcagccgcatcggacagcaaccctacttctaggttttcacccctaggatacacttgcacacgggtggagatggtgcaaggatactcacggagcggcgcctgtacaagttacagcagcacaaccgcaactcgaaggaggctgctgcggggcagggacgtggagtgatctccaagatacggcggatgagaaaggccaggtgtggcactgcgtgcgccaggctgccactgtttgtttttaaagggacctatggctaatgctcagatatgaagagcccctgcagggtggacaggaaaccacccacatggctgcctctgagaagcagaaccggagaaccgggaggagggaaggaggccctgcaccgtagaggcttttgcacttttggatgttgggccatttggatggagagctcattcaaaaaactcagaggcggaacattgcttcagagagctctgcccactggatccttccagtggattccaaagggagccgggggcccagcttgctccccgcacaccccacacagctcttaggctgagaagggccagcctcctgcagcctcccacaggccactcggagcccgaggaggccatacccaggttgagacaagccagcgtgttggtacacttccactccttctcgtgtgtggccactttgacgtcatccatgacgagaggcacccagccaccaaacacgtacattctgggagtgaggagggaagagtgggaaaggattgtagagttggtgccaagctagaggccacctctgctaccccagttctagagctcagtcctctggctctccccaggagagtccccaaggatgcgtgaagcctcctgacgtggccctctcctgcctggtggctcagccctcaggagaactgtgtcacctctaccacataaaagtgccgttcagctcatctaaagctcaccttcatgtccacagtttctaggttccctttaggacctggacatccacaaagacacccaggtgcttgcacagaggacctagaacactctgtacctgatagggcggagcctcacaggcccggggagggtctcagactcagcttgtgtgtggccctctcccccctgaatctgtctttccttggtcccccagggtcgtaatggaaaaacagggctgccaaatgccagcccagccagaaagaggcatcctcaggccttagggtctgacaggacaaaactgagtgagagcccttcgggggaggggccacgccagtctagagaagagagacgcaggtgagcagccacttacttatttccgatggtggttgccgagtggagactgcgaggaagaggcgccaccccgctgagactgggcttattccacgtcagggtgtctgcagagagacggaggggaaagggttacacaaggtagactgcacacaggtcgttccctggattcaagctagctcaggaaggtaggatctgtctcagtgagagaattccatccctggcttccctatagcctacggcaggccctctgactgttgtcatggtagctagattcctgtgttacccaggcggtttcgaccaggctagcaatagcgctccttcaggtacatcctgagcacctgccctgagccaggactgcactctgtgctgggggaggagtggtgggcacaccccgaactctccatgaaatacgttcaccgccataaccaccttaggctacagacattttggcaaactgttggaaaattctctcacgggaaactgcttctttggagtgccgactctgatctataggacaacatcgccatctcctctctcccagctgaagaggcctccggagatccacagttagtaatctttcccagccactcctgataccaccacctggtgaccggcccaagcagtccccgaaggcctcacggtttaccggcatccaatggtaccacagcagtcagaccaggatgcagcactccacacagtctgaccactgacgagtcaagagggactaatgctacccggatccagagaattccattctagaaagccttaatgacttattctcttataagcccgcagaccaattcagcccactcagccagcacagggcagagataacagccccaaacctagggacgatccagggttccccaccctggcccaccatgacaagaggaaagcacgaagtggtatgctccagctccctaagagccccacctcaccatacaacagcgccacccacggggccagccaagaggcagacccgctttgtcccatggctgctggggtgctaccaccctgctcaccaatatctagggtccacaggtcccccagcctgcagccactcatcccgccgtagatcaccagcttggacttcttattgtctttttcggtgtagaccacggcagtatgtgactcccggggtggtggtaggaccccgtaagtgatgggaatgtcccaggctaccactccagagcctggccgtaattccaggatatataagtcattcaggtacctgacgaggaaagatcagttacggcaagtctcgactcctcacgccagaggcttcgctggatggctatcagtgagtggcagcctccccagaacacaaaggggctagggctgtgggagctctgaagttcttctaccctagctcttgaggaaggggctgccagaagctccctaggatgagtccaactggaacaggggacacagggtgggtgaggctgcacagcagccccgagtccagacccagcagcaggcccccgccatgcacacaaagctgggtattatatgagggctccgcagagcaagagggggcgctggcttgggactacctccagacagagagtccttggccacgggccttggaaaatacccatcaggaaacttgtaggcagcggaggctgagaaggaacgcgagcagctctaagccgactccgagagctgggccagcccaaggcaaagtggcttccacctccagcttggccctcctcccacgaggcctgctcagggtcagtagcgattttggagcccgaaagctcctgagagggcatccggtgccgctctctcatttacaacccagcacgagaaagggacccggccacggggctctgctgcgcacattctttaggacaccatggagccctgtgcatgtgagagcacacccacccggggggttccagagaaaaggaccaagcctcaccttggaatgttgttctttgggtcctcgctatcattggccagacccccaaacaggtagcatttgttgcccacaagggagaagctgtgcccgagtcgaggacacggagggggcccgtttttgggcgtctttgctttgagtctcttccactcccaccggctcgcctgcaaaatcaagacctggagactgaaccgtgggatgagaaggccaccactagggacccggggcaacttgtggtggaggaggaaatggccgggggtgagcgaggtgccttgctggagcaagaaggtcctgggtgttggtccttgctgccttcttctgaggtgggccaagttcagagcagccttggcagactctcaagcgtcccttccacctcccgcttgcctcaaccctgaagccactaccgtcaggtcacatggggccaaggaggcagagtgagaacctggggctgctttacctggagttcgtagaggtcattgctgtatttcccatactccaccatcccaccaaacaccaggaggcgagtcccgtcacacacgaagccataggctgcacacccagggggaatgtcccccctcacggctgggatgaaccactggttggttgctggggaacagaaggaggcagaagtcagaacacccgggagcccccattcctctcattccccaaatgtgccagccgtcaagcttggtgagaggggctgagccagcaccatccctgcgggcgctctagcaactccagctgcgctacctgggccatcttccaaacccctcgacttcaggccagtgcaaaagagcctgtgaccaccctgcttctcgccaaggtcatcttaatgagcgggaagttactgtgcaagatccctcatcagctactgggaatctagccactgccttccttccctagcactcagtgatcagacatgaatttctccccaaaataccctcttggtgggcctgtgctcctcctccctggagcccacatttttgtcccttcatcacagggtcaggacagccagagcccagagcagcactttcaagtggccaaaacagtgaccgctgcaggctacgaagagccatggggatgagacccggcctctgctctgacctcccggacttcctctggtctcctaggtgatggtccaccagcatccctccctgcccctgctgccacacctatggtactccagaacattcttgcaagccagaggcagcagtctcagcagagctgtgacagaagcttctcaaaagctcatgagggtgaggcgaccaccaagaaagagggaaatcagaccttaggcactgctttgcttccacaggatggcacagcagccttcagctgggaccaggcccctccctcatgtcctcaaacttgactcccctcacacctggcaggccagggcttccccgaaaacctcctcctatgaggggtccctcagaggattcaccacactctttccagaaaccccaaactgggggccaggtgcaaccccgactctgtgcctctgagctggcctgggtgagatctcagcaagcagacggcagaaggaactgaggcccctccacatgactcaagacgcaagatgggtcccccaggacgtgacagggcatggggggattcctgtggggtgggaaggcttccacacagggatgctgtgatattgtgatataatacagactattcagtttggtggccaaaagtgttgtgagaccatagaagaggaaaaacagtgttttttttccatattcaggtgtgcacccagggccaggcggctgaccatggttgggaatgcatgccccactgcactctggtcccacccagtctcacactgtcacccccagggctcaatgcggaaccgtgtgcaaggctagcccttatccaaagcacaactcccagcctgggtagcacagggagaccccgtctctacaaataattttaaaacactggctcagtgtggtggcatacacttgtggtcctagctactcaggaggctgaggcgggaggactgcctgaccctcagagtttgaggctgcagtgagctgagaccgcaccactgcatcccggcctgggcaacagagcaagacctaacctcaaaacaaacaaacaaacaaaaaaaacagaaaaccccacacagcacaactgtaccaccaccgctcctcctgaggcgagagcacccccaccccgctctccagcacccactctgcgggtaggcttcgagcaggctgacagcctctgcagccattcagctgagtcactgggcctcggacatgccgagcactagagctcccctgccatttccctaaagcagagggacaacacctgtgccgcccgcatgtgcaagctcggatcctggccctctgcctctttctcattcccagtgcaaaaaccaccccagaaaagcaagagctgccaaggccaacagccttgcgcactggagagccgtcctgaccaatccctggagggagctccatgcaagctaccagggtaaacgcataacgagacctaaggctgcctgggccaactgctctcggtaggtaaaggggcagagcccaggagggcaagcgacacctgaggtcacagcgtaaaacagagacagagacaacagccccatcactgacttgaagcaaccgatctgtgccttccctagggtcccatgtccaggcagccaccctcactcccctgagcaccctcgtggtcaaagcccacagctatggggctgcgggtcagagtttgggacaaagctaaatggcacgtggggtcagtgggcagctttcctatcacacgctgatcagtgagccggtgggccaggccagaagcgccctgtgatatctttggggatcccgctcaccagatccttctacaggacccaagaggtgctgatctcattctagaacactccaggcagggcaggggccctccccacccccgtcaagagaggtctgtcagggagcacagctcctggtgtgacgacaaacctgcggctcctcatctcacccacgagtcctggttccgccccctgaaagcacacgagcaagctctcctcccttctcccagcttttcaatgtgacagctgctctcagtcacccctgaatcatctggggggtgtcatgtaacccaatccttgggcccctcatcctggaaatgctggctctcagctgggaggggaaggtggggaaaggaccctgcactagatgaagaccactccagctcccctctcctgagcaaggctgtgccccggcctctctgtgtttcatcagctcccccaaccacttcatgctctgcaagctccatccctggttgccactgtcccatcaccacctagagactggtgcccatgcagtgaggtggccggtcaagttcaacgagctgccttcctctctgttctacctgtcacattagagcatttcctgtgtggcatacgacgtgctgggaggcacagaggacaccgatcttgtgctcatactcccaatggggtaggaaggctgcatgcccccctcccacgatgagacaaacaccctagaagagctctgaccaagccgggcccttgggagcacagagcagtgcgactgctggagaggggaggacaggagtggaaagggcttctcagaagaggtgacgtttcagccgggccttgaagggtgaacaggatttcccgacaaatgaaactagcagggccaatcaggaagtgactgcaagagtctagtaagaggagaggagggcttggtgtggaaggggacacatttgatgcctgcccaacgcaatgaacaattagatacagggacagaggagagaatggaggcatttcaaaggtgatgggccccaaagacaggtggcagaacggcctctatgaaggtttgcactcccgcccaactccgccaccagctgggagggcgaccctggacctgtcacttcccctcttggaccccaatttcctcatctgcagaaacaaggaagtagttccactaggtattttccaaggctccctccagctccaagaacctatggacattacagagccaccgtagccaaagctctcgctcccccaccccccacacctggcagcactctgaatcctttggcttgccacatggaactaaaattccctaaggacaagcacagtagctaccctaagagctctcaaagcacacaccccctgaagctttcttatcctagcaacgggaaccccttccagatcagctctctccaaaggtacaaggctttttgaggactgatcccgcagaactgcaaggggcacaggcgtgagaatatgccctgatctcatcccaaacacaacaaaagaagacaagacaaaggtgacgaggccgggctggcgggagggggcagaaaccccggtgaggaagagggcttcaggtctgccagctgctctctcgtctgaggaattgccgatgacagtttccaaactgctaccctggaggatcccagagcttcattttaagcagccctttggaaggcaggctacccctctaatgcacaacctgtctttgcagactggtaatgaattcatgccaaagtggtcaattcattttaataaactaatgaatatgcagaggccccaggaagccaaggcagcagtggtggtggactctggagccgactgtaattaggcccctgccctactttctaaaattgcatttccctgccagggagcctgctccaggccttatgagaagaaagtcggtccacagagtggagaaggtgctgctcatggtgacggtgcctctataaacagccccaccactggagaagccttagcttactgagctaattcctgctactgcagctgcctgggctggcgcggggcaccaccaaccaccaagcgcccccgcccgggggctgctgagaaaggccctgctccctggaggcaacaggtgctgagagacctggaacgaaaaacggtcacagacaacccaccagcctttcaaagtcaacgtggtaggtggcgataatctccgagatgtggagaaaccagcactttctgccttggggggtggggaaggaagcggcacccaagagcccagctccagccttcccaactccctaaaccaactttctccctccaggcagctccagcttcccacccccagagcatcgaggcactggagctcagccaaagaacagcagcctctcaccgctcaggacacaaagcccactcagcgagggtttgtctgcagggccaccaccgaggccaggggatcgctagagcccccaggagagaacggccgcggagcaaggggttagtgctgggagccgtgcctgccactcaggactagggcatcccaaggccctcccccagccgcctgcagggggcttttccctcacccagactcttccagctcttgcctgggaccgaactcaccctgaccctgccttctgggcaaggccagggtcctgtgggccaacgggcagtcagtaggcaacttgggaactgacccttgtgctaggggcacaaaacgggccaagtagccaccaagaaaaaggatgccacaaagctgtcgtggacagcagcaggctttctgccctagagactaagcaaggctactaggcagaggcaacaacaaacggcccccacgaaggccgtggtgcatcagccatacctgaagagagaggttcctccccttcccaactaacgggctttgggttttgcagggaggcagaagagcgggtggggtaaccccctggatccgcagaagcggggagacacacgactacgcaggccgctgaggggtaactggaattcagcttgtaaaccagaaggcaccagattaggagaaggggcgacttggaaagaaatgctgcagaagtaaacgtggaaagggagaggcggccctgccgccggcccgtcctaggggtccccaaggctccggcattacccgggtcggcggatgttaaactctgcgtcctaagagcgcttcccttccctccctttttcgagagacagagaacgaatctgtaatctagaaatggtcatttctccagaatgggcactcgagatgagggagagctgagcaggcgcaggagaagggagggagggagggaggggagctctgcctgcgccaaggggacacatccgcccgccccagccccagccccagcccgctgggtaacggtgtgggtctgaagtcaccaccgctggcgacagcccctctccctcaccagtcggactaggggctttcttttaactaacgaaaaccaatcctcaaacacgggagagacaagggaacggggagaagatcagagaaaagcactgaagcccggcacagcaaaggggaggggcaagccgatcagtggggagggagggggaggaggggagaagggggagggggacggggagaggggagaaggacgggtaagggaggaggggagagagagagggaagggtagagggtgagggaggagatggagggagggaggagagggagggagcagatggagggagggaggaaagaggagggagagggaggagatggagggagggaaagagccgaagacccagcgggctttgcactcacccgtgttgtacacgtgcagttcgtccactattccctcgttgccgccgccaaacaccacgatgagctccttgatggccacggcgcggtggccgtggcggggccgtggcaccggacccgaccagcccaccactcgcttccagcggggctgcagaagcaccgctggcaagttggcgggcgacacggccgaagccatagttccgggaaagggtgcggtggggagaagtcaacaagcgggaagggagcccctcaattcctttcacacaccccctttcgtctaaggcagctctcacggagaagcggtttctcacacagcggtagacgactccatggaggccgccatcttaactgccctccttccctttggctcttccctttcttctcgctcaccccgtctccgcaagagccgcccgaaactgtcgagcgcctaggctcaagaagctggaggccgctgagtcccgtcgccccgactacttgtccgggcgctcccgcttacaagctcgggcgggaggccctgggagccgccatcttgagccgcctctctctcctcccttcctcagtcgtagccctcccccgccggaaatggcggagccccggcccggttcccacacccccaagtccccagcactggccggcttccggggcgggtggaaaggagccacaagcgccgcggtcgtcgcagccccgccggcgctcagaccacaattgtgggagccgccatcttgagaccgtcccgcttccccgcccagcgccttagtgcagccgccgctcccgaaacagcctcgacacacctaacgaatggaggcgggccggaggccggtggaaccagctcgagctctcgagggccgtttgggggctcgcgccgtacggcttgtgaagtctcgcgcctctccccttagtccgcctctgctgctcaggctgcgcctgccgccgtgggagccgccatcttgagactagctccccgttcccccctattctcttcctcctaggtcagttcttccactgcacaccaaactcaaggcggtgtccgatcctcacttcccgccttatgactccttcccacaggagccgcttcaaagagctagagttaggccccgaagcggcaactgtacggcagaagaagcggtaacggcagggcgctcatgcctcctccctgggagccgccatcttgtgtgaagaagtaacaactaaacatggcggcagcggcgccggcggtcgggcgaggaggcggagccgggtgacgtcaccgcttccccccactcgccctcgcaccgcttcgcccctgggcccaagcctcttaaaggacccctgcgctgcctcgcggcgggggtgggggtcggcgctgccgcgcgctgggctaaagctcgagtcgcgctcagatcaggtgcaggcgcaggcgcgccccgccccacggcccccccaccgggcgagcctccacgcctccgccctgggagccgccatcttgccacttcccctcgcccggccgtccgcgggcgtcaatagcgactttcagcacaaaacaaagatggcggcggcggcatctcggaaatgcccggatgagactgctaacccctccgacgcgctcggccccgcccccttgggaacggtctctcgggttgataagggacgcacgcccgaagaactgcctttaaccagcactggggacagcggcacgcaggtggccggggttggcgaacagccactgcagccgcgcctgcggccgggaagcgagcattttcgcgccctgcacacccagcagccgcaggaggcggcccgaggcgcgccgcgggggagccgggggcggggcgacagtgggaggcgacgcagccgagcgccggcgcccgggggtggagcctccgcccgctcccaggctcccaggctgcggggcccgccctcgggcgccaccgcctccgcccgcgccgcagcaaaatgagccgggccgcgcgccccagaccgccgcgcgctcggccgcccccactgccgagaggcccgcagtcgggccggtggcgcacgagccgggcgggcgaccgcgggaggcgtccgcgtcatctcgcgtcacctcgccccgcccgcttcccaggcttcgagtcccgccctgcgcgcaggcgcaccggcgctgctcggatcctcccttttcggagatttgaatttcccccagcgaggcgagtgaggcgaaatacccgtatggtgatagctggccttttcgcgccaatactgtaagtgctcaccgcagccctgggaggtgggtcccggcctcgcccccacgtttcgcctcctctaggaggccgcccgggcgcggcggcggcggcggcggcggcggcatccgccctgccacgcgcaggccgcagcgcggggacccaagctgctgcccgggagcggcagtcgccagtagaaatggacagaccggtcctgtcagagcctgtggcttttgttgtaaacgtctagaagttcagttaaattacaagatctaccagatctaccggcgggcagaattattactttgaagttactgaagttatgcgtcctgctggaagaccttgtaatttaatgcgttagtaaagaagcacacgtcaccctctcacacattttcaacaatatttttaaagtcgcctctcaacatattacatgtattttgtaatcgtctgtgttttagttcatgcagttggaagtatccatttgagaagggacaaagagaagaattcttgcctgtctgtgccaccacctgctctttgtgaccttggctagttacctcacatatgtccccaagtcccccacccatggtaaataagaaaactaaggcctgatgcgttggctcatgcctgtaatcccaacactttggaaggctgaggtgggaggattgcttgagcctagccggggcaacatagcgagacccggaggcatggtggcacacgcctgtggtcccaggtacttggaacgctgaggtgggaggatggcttgagccagggagttcagggctgcagtgagctgagatcgcgccactgctccagcctgggcgacagagcaagaccctgtctcaaaaacacacacacacacacacacacacacaaaagcagctgctggtttccaagggccttgcctggaatcagtccagaagctaaattaatgttaattgatattcctttatccacagaaagacagcaagaaaggtcatgcggagcgggggacataactaaccataaatgctaaaggcctggaggtgacagtgcctgctgtttaaacgcgtgcgggagagtctggggcctttagccaggagattgtcaggcttcccagggcttccctgaaagaccccagacccaggggccagtgctgttgaggtgttggctttcccatgccaggcgctgggggaagctgtgacgagatttgagtgtcacataataaggatcatggcaattcaaaggtacagggaagctaggctataaggtaaccagctcggttttcctgggggtcttggacaggtgctttgattacatggtcactgtcagcccgtacccccggtcagatagactgaacccctgcagccggaaagaggagttgctttccatgcccttcctggagttcttcctcgatcaagttgacagtgtttgactcttgttccagctctccgccctgcttgctggcaggcaggagggtcagactagcatgggtgccatggggccctaggtgggtgcagggaaggacctgtagacgccatgcggggcctcagctggtgtctcagctggagtcaggagctgaacggggaagtgcctgagaggaaatgacagctgagtcaagggcaatggccaggcgaagtgggcaaagggcttccaggacagagctgggcctgaggagctcacagggctggatggggatggcactttaagtctggccaagactttgggacatgatccaggacatggaatgggaagctggtcatggaagggtggaaagccagggcagacatgatcccatccagggctgctcaaagatgctggggctgcggtgtgcacacccctggacccagaggcttttttgactgggaggacggggcaggaggagttcgggtgccccatgctgagatggcaggcttgtgtgaagcaaggacgtatggagtgatagtgaggactgtggttcctgtgtggcaacaccatgcttcagagggcaatggggcacccacatgccaagcctggtggccctcctcagcaacggaactccaaggcaagaaggctgagaatgaggcccaggaggatgcggtgggccccaggacctgcttgagaagtgaaatagcaaacaggactggtaaaagggagcagaggtgctggctttgttctttaatataattgaattgaaattgagcagggcttcactgggcatctgaggaagagcaaggaatcagaccctgtcccacccatttggggcctaaattgcagtagggcagatggacattgcacctcaaaaataaacagtgcttgtcacatgaatcatttgcaaatattttctcctatattgtctcttcattgttgattgcttctgtgctgtgcaaaagctttttactttaatatactcccatttgtctgtttttgtttttgttgcctgtgattttggggtcttagccataaaatctttcctggagcatttccccattttcttctagtagttttattttatttattttattatttgtatttatttatttatttattttttgagacacagtctcactctgaaacccaggctggagtgcagtggcacaatcttggctcactgcaaccttagcctcctgggatcaagcgattctcctgccacaccctcacaagtagctgggattacaggcgcatgccaccaccctggctaatttttatacttttagtagagatggggtttcaccatgttggacaggctgggctggaactcctgacctcaggtgatctgcccgcctcagcctcccagtgtgctgggattacaggtgtgagccaccacacccagcctttttttttttttttttttttttttttttttaaagacagagtcttgctctgtcgccccaggctggagtgcagtggtgtgatcttggctcactgcaacctcctcctcttgggttcaagcatttctcctgccccagccccctgagtaactgggattacagatgtgcgccaccacgcccggctactttttgtatttttagtagagacggggttgcactgtgttggccaggctggtctagaactcctgaccttaagtgatctgcccgcctcaacctcccagtgtgctgggattacaggtgtgagccaccgcgctggcctcttctagtagctttatagtttcaggtcttacttttaagtctttaatccatgttgagttgattactgtgtgtggtgagagataggggcctagttttcattcttcttcacatacttatccaattttcccagtgccatttattgaagagaccatcctttccccaatgtaggttcttcgtgcctttgtactacttataatagctaagatatggaagcaatctaagtgtccaccagtggattgatatgtaaagaaaatgtggtatagatacatgatggaatattattgagccatttaaaaataaactgttggcgggcgcggtgtttcaagcctgtaatcccagtactttgggaggccaagacggccagatcacctgagatcaggagttcgagaccagcctggccaacatggcgaaaccccatctctaccaaaaatacaagaattagccaggtgtggtggcaggcgcctataatcccagctacttgggaggctgaggcaggagaattgcttgaacctgggagacgcaggctgtggtgagccgagattgtgccactgcactccagcctgggtgacagagcgagaccctgtctcaaaaaaaaccaaaaccaactataaaaaataaaaaaaataaaaaactattggctgggtgcagtaactcacgcctgtaatcccagcactttgggaggccaaggtgagagggtcgcttgagcctaggagtttgagaccagtctgggcaacatagcaagaccctgtctttcaaaaaaaatttaaaaatttgccaggcatggtaacatgcctgtggtcccatttacctgggaggctgaagtgagaggaccacttgagcctgggaggtggaggctgcagtgagctgcaatcacaccactgcactcagcctgggagacagaacgagaccctgtctcaaagaaataaacaaactaataagataaatcttgttatttgtggcaacatggatgagcctagaggacgttatgttaagtgaaataagccaggaacagaaagataaatattgtatgtgttaattcttatgtaaaatatttaaaaaatcaagctcatggaaatagaagcatagtgggtattagaagctggaaagattagagagtagggaaagattcggaggagtcggataacaaatacaaaatgccagcttcatagcatgaatggatcctgctgttctgcactgtagggtgagcactgttaactacaatttcttgtgtattttcaaaagactataagaaaggatttggaatgttcccaacacaaagaaatgataaatgttccaggtgatggatatgctaattaccttgtttgatcattatacattatatacatgtatcaaaatgtcactctatatgctattaaaaataataaaataggctgggcacagtggttcacgcctgtaatcccggcactttgggaggctgagggggacagatcagttgaggtcaggagttcaataccaccccagccgatatggcaaaatcccatctctactaaaatacaaaaattagccgggcgtgatggcccgcctgtacttccagctactcgggaggctgaggcaggagaatcgcttgaacccgggaggcggaggttgcagtgagccgagatcctgccactgtaccccagcctgccccacagagcgagactctgtcccaaaaaataaataaaataggccaggtgtggtggctcacgcctgtcatcccagcactttgggaggccgaggcgggcggatcacttgaggtcaggagttggagaccagcctggccaacatggtgaaaccctgtctctactaaaaaaaatacaaaaaattagctgtgcatggtggcgggcgcctgtaatcccagctactcaggaggctgaggcaggagaatctcttgaaaacgggaggcagaggttgcagtgaggcaagatcacaccactccagcctggacaacagtgcagacagtgcaagattccgtctcaataaaaaaataaaataggccaggcacggtggctcatgcctgtaatcccagcactttgggaggccgaagcaggtagatcacgaggtcaggagttgaagaccagcctgaccaagatggtgaaaccccgtctctactaaaaatacaaaaattagccgggctaattttagttgtaatcccagctactcaggaggctgaggcaggagaatcactcaaaccccggagggagaggttgtactgagccgagaccacgccactgcactccagcctgggcgacagagcaagagtctgtctcaaaaaaacaaaataaaatgaagtaataataaaatagtgctaagtggtctgcatatacagatactttttttttttttgagacggagtctcattctgtcgcccaggctggagtgcagtggcacgatcttggctcactgcaacctccgcctcccaggtttgagcgattctcctgcctcagcctcccaagtagctggaactacaggcatgagccatcacgcctggctaatttttgtattttagtagagatggggtttcaccatattggccagggtggtcttgaactcttgacctcaactgatccacccacctcagccacccagagtgctgggattacagacgtgagccaccacgcctggccactttttttttttttttttttttttttgggggggagagggagtttcgctcttgttgcccaggctggagtgcagtggcgtgatctcggctcactgcaacctccgcctcccgggctcaagcgattctcctgcctcagcctcccgagtagctgggattataggcatgtgccaccacacctggctaattttttgttttgttttgttttgttttgttttgttttgttttgttttgtttttctgagatgaagtctcactctgccgcccaggctggagtgcaatggcacgatcttggctcactgcaacctctgcctcctgggttcaagcaattctcccgtctcagcctcccaagtagctgggattacaggcgtgcgccaccacgcctggttaatttttttgtatttttgtagagacagggtttcaccatgttggccagactggtctggaactcctgacctcaagtgatccacccgcctctgcctcccaaagtgttgggattataggcgtgagccaccgtgcccggcctaatttttttgtatttttggtagagacggggtttcaccacattggctaggctggtctcaaactcctgacctcagatgatccacctgcctcggcctcccaaagtgctaggattataggtgtgagccactgcgcctagcttttttttttttagagatagggtcttgctctgtggcccatagctcactgcagcctccatctcctgggctcaagtgatcttcctgcctcagcctcctgaggagctgggactataggtgcaccaccatgcctggctaatttttattttattttttaaatttaattttatgtattttgtgtagagacagggtctcactttgttgcccaggctggtctcaaactcctggactcaagcagtcctctcaccttggccttccaaattgctgggattacagatgtgagccaccatgcccagctacatatgctttttgatgtataacagggtaatgtccagataaacccatcataagtcgaaaatataggaactggactttcaacttaagaggggtttagctgggtgcagtggctcactcctgtaatctcaggactttgggaggccaaggcaggaggatcacttgaggccaagagttcgagaccaggctgggcaacatggtgagaccctgtctctacaatttttttttttttttttttttagatggagtcgcgctctgtcgcccaggttggagtgcagtggcgcgatctcagctcactgcaagctccgcctccagggttcacgccattctcctgcctcagcctcccgagtagctgggacaacaggcgcccaccaccacgcctggctattttttgtattgttttagtagagacggggtttcaccgtgttagccaggatgctctcgatctcctgacctcgtgatccacccgccttggcctcccaaagtgctgggattacaggcatgagccaccatgcctggcccaaaatttttttaacaaaaattagcagggcaggccgggcgctgtggtagggaggctgaggtaggagaatggcgtgaacccgggagatggagcttgcagtgagccaagatcgcaccactgcactccagcctgggcaacagagcaagactccgtctcaaaaaaaaaaaaaaaaattagcagggcaaggtggtggtatatccctggtcccaactacttgggaggctgaggcaggaggatagcttgggcccaggaggtggaggctgcagtgagctgtgattgtgccactgcaccccagcctgggcaacagagcaagacccccgtgtctaaataaaaatacccaggccatggcagcagaaagcaaggaagaagccacgtggaagccctcctggcgcttcttccagggaggtgagcagagagcacctggggccaggaggcggcatgcctgggtttctgctcctcctcactgtaactttcagccaagtcaaactgctagagtttcagtttctttatctgtgaaatgccggggctggcacagatggtttctaagatccctcccaggcctggaacttctaagcgattaggtcaaaggtgagctaaccgggctgggcacagtggctcatacctgtgaatcccagcactttgggaggctgaggcgggtggatcacttgaggtcaggagttcaagaccagcctggccaacgtggtgaaaccccaactctactaaaaatagaaaagttagccgggcatggtggtacacgcctctaatcaccgctactagggaggctgaggcaggagaatcacctgaacctgggaggcggaggttgcagtgagccaagattgtgccactgcactctagcctgggcaacagagtgagactccgtctcaaaaaaaaaaaaaaaggtgcacaaaccgaggcccaagacagttaaggtgcaagatcacatggttagtaagtgggagagccaaggtttgaacagtctggcatcagctgaccaggaactggagcccacccttctctctccctgagcccgcctacccgcccaccctcttgagtgcgaaatttattaatatggaagggagaagagctttaatgattggagtcattttcagagcattaaagctcttctcccttccatattaatgtatttctcagctactagggctcacttacagcaccagtggccccaaagcagttgacagtcagtggtaattaaattgtctctctggttctgtgactgaaggagacagaaggctttatggtggcctgaggaaagaaggtgatttggggcttggcacttcaggagagggcaggcgagtgagccagggaagctggcctgggaagcctgcgggtcacccccttgcctcccggcctggtgcttgagtggcagacggtgaatcctcctcctcctccatcccccaccttgtgtcagaggccagagctcggactccatctaatggtctctagttcagctgggtatttggtgaaaagggctttggggctggagacgtccacttttataacacactgacatgggaaggcgcattctgagttgtaatgacagagctagacaggtcttgtctgtagatgcagtggctttaaggaaactaggacgatgggcaggattttcctaggtgccaggagaaaggggtgatagaggattctagaggcttgagagagtcagtgtgcagcggtttcactctgatttgcttctccagtgaagatggttggtagctcctgaggccgggggtcaggaacatggaggcggtgctggggacggtttgttttctaaccacactccttttgtaaccacaaaggaaaaaggcagaacgttcctccgctggcgccagccaatcagcaggactcctgccttccttcggggcaaggtcgcagcatctgcctcggaaatcacgaaatcacggggcttctttctgctggctcagccgggaggcccagagtgttctgcagaggctgcgtattgaaggctgctctctgaagctccctgccccaggtcacgccgccggttccagatgaatccagagtgggggcaggccttcgtgcacgtggccgtggccggtggcctctgtgccgtggctgtgttcacgggcattttcgacagtgtttccgtgcaagtgggctatgagcactacgccgaggcgcccgtggccggcctccctgccttcctggccatgccgttcaactcactcgtgaacatggcctacacgctgctggggctgtcgtggctgcacaggggcggcgcgatggggctgggtccccgctacctgaaggacgtgttcgcagccatggccctgctctatggccccgtgcagtggctgcgcctgtggacgcagtggcgccgtgccgcggtgctggaccagtggctcacactgcccatctttgcatggcccgtggcctggtgcctctacctagaccgcggctggcggccctggctgttcctctctcttgagtgcgtctccctggccagttatggcctcgctctgctgcatccccagggcttcgaggtcgcactgggtgctcacgtggtggccgctgtggggcaggcgctgcgcacccacaggcactatggcagcaccacctcggctacctacttagctttgggggtgctctcttgcctgggctttgtggtcctcaagctgtgtgaccatcagctcgcacggtggcgtctcttccagtgcctcacaggccacttctggtccaaggtctgtgacgtgctccagttccactttgcgtttttgtttctgacgcatttcaacactcacccaagattccatccctctggcgggaagacgcgttgaacccagggaagaacctgctgaaaaccgatgacccccagcattgaaatggactctgagatggcagcgtggtgccagtgtcagacatcctgtgtgtgatgatatgcactgatcacacaagactgccctttcctgagaagctgcgggcttcggtgtggaggggtggagtgctgtgatctcgacaacttactttcaaagacataaagcacagatctccgcacaggggatgtgtgtgttcctgatgtaatttgcataacttttctgtagtttgaaatgtttccaaataaatattggcaaggggagtggaaatgacaccaagaagcccctcatgctcatggttggacagagagcgatcgtctggagtatctttggggtgtcagctctgggtgtggactggcagcagtgaggcaggccagtcagtggggtaccagtgagtgtccttagaggcggctggattcagggagactgagtcacactaaatacgtgcccagcagactgatggggaaatcactcaattatccccatgacatctgtgactgttaactgtaggcaggtcacgtgagagccacatcacctcagatcgtctgtggaaccaggcagtgtgcatccagatgaggaaacacacaaatgtcaaaagttgaactctcaacagaaagttgctttgtgggtctcccctcagagccagggtgtggcttagatgcccttagtggctacagtctgagcagtccccacctgcccgtcacccaggtccttgcgaaccagtctgctgacagtatcgtcaggcactgtgctggaggcggcacgtgcttctcatgcaggcaacagtttttgagccctcgagcccaaggcccagactctctagtttgtggtcaggatgctgggtcattcttagccgcagccagagaggcactgaggactccgtgccaccctctctactcccgggacagtccttcctgccggtcactatgttacttagaggcctgcctcacctcctttcatctgaaggcatctggtctgtaaaggggacttccttttttcgagacagagtcttgctctgttgcccaggctggagtgcaatggtgtgatcttggctcactgcaacctctgcctcccgggttcaagcgattctcctgcctcagctgcctgagtagctgggattacaggcacccaccaccacgcccggctaatttttgtatttttagtagagacggggtttcatcatgttggccaggctagtctctaactcctgacctcaggtgatccgcccgcttcggcctcccagtgctgggattacaggcatgagctcccgcgcccggcctgtaaaggggactcctgaagacaggtaatgtcatttaactcaggggctcttcatcccagactccatagtcttgtccctggagccttaagtactaaggagggtctgctttaagcccacaaattaaatggagaagtgaccagctccaaaggtgagggcagaggagagaggatgccctgtccctgccaaatggcatctcagcatgggccacccatgtgcacctgctcagtgccctcgaggttggcattcggcccacgactgtgatgactgagatgtttctggaactgggcacctgggctggatgttctgtcctggctggctgagcacattgccaccaggtaaggacctggggcaaatggcaggacccgacccagggcttggggcctgggggtggggcacgtggttggcaggggagagcaaggacagcacctgcttgggaaacagcctggttccatttgaggtcgtctcgaaagcaccatgtgccctagaagagggaagaggctgcacacatcaccagagaggccacccttacttcacagaggctggagggagggcgaaaagaaggcgggcttccatgcgggctcagagacagggtgggggcaggctcttcatccagcagtgggggatccccttttgtgatttctctgtgagtagctgtttccctcattgacagaggactgctgggacttcatgccacacctcgcagcaacaagcactcatcacgattttactttttcttcctaccaatacctgtgtaataaacagccctgcgagcctcctgggtcaggcggggtcccacgggaaacaggtggtgtgcctagattggggtgattcagggcggttttgtgggacacctggaagagtggaccccacccaaaggagaggcttatgtggaggggacacctccagaggggcagggactgcaggaagcctggctccgctccctccctctcctgccagagttgccagattatacgccaggcgatgaacaatggttttgcacaagcgtgtctcaaatgttgcatgagacatttctcctactaaaaaagtattgtttacctgaaattcagatttcactgggtgttctgattgttatttgctaaatccaacaaccacgtcctgagccaacacaagcagagccagaagccccggaacctgcgcaaggcagagcaggtggcaaagaaggctccaggcaggccccggcctggaacctgcactccccaggccctttttgaaattagtgtttctccaagtatggccagttgccattagtcacacagcttcctgcatcccttcctgcccaggcgaaccccccttctggggccgggacctcagagtgcctcagccctggcccggggtttgcggattccaccaacccctgagccactggaggaaggaggctggcggctgtgcctccctccagctctgcagtccacggaggagctcggcctcgcccagggggattggctgtcagggccgccgttgccgttactggtcttggtctcagtctcgctgctccactgcgtccccagcacagctggggagccaatggttgccagatggggcctctccccgacctttgacctaacggtttagaggttccaggcctgggagggatcttagaaaccatctgtgccagccccggcatttcacagataaagaaactgaaactctagcagtttgacttggctgaaagttacagtgaggaggagcagaaacccaggcatgccgcctcctggccccaggtgctctctgctcacctccctggaagaagcgccaggagggcttccacgtggcttcttccttgctttctgctgccatggcctgggtattttctccccacataaaatagttttagggcctggcgctctggctcacgcctgtaatcccagcactttgggaggccaaggcgggtggattatctgaggtcaggagtccgagagcagcctggccaatatagtgaaaccctgtctctactaaaaatacaaaaaattaaccaggcatggtggtgggtgcctataatcccagctactcgggaggctgaggcaggagaatcgcttgaacctgggaggcagaggttgcagtgagccgagatcacgccactgcactccagcctgggcaacaagagcgaaactctgtctcaaaaacaaacaaacacacacacacacaaaaatagttttaagcccggtgcagtggctcacgcctgtaatcccagcactttgggaggctgaggcgggtggatcacctgaagtcatgagttcaagaccagcctggcgaacatgacaaaaccccatctctactaaaaatacaaaaattagctgggcatggtggtgggagcctgtaatcccagctacttgggaggctgaggcaggagaatcgcttaaatccgggaggtggaggttgcagtgagctgagatcgtgccattgcaccccagcctgggcaacagagtgagactccatctcaaaaacaacaacaaaaatagttttaggccaggcgcagtggctgatgcctgcaatcccagcactttgggaggctgagaaggaagaattgcttgacctcaggagtttaagaccaccctggacaacgtagggagaccccatctctaccaaaaataaaaaaaattagctgggcttgatggtgtgtatttgtagtctcagctactcaggaggctgaggtggggaggatcacttgaacccaggagatccaggctgcagtgacacagttgtaataagatggcatcactgcactccagcctgggtgacagagcaagaccccatctcaaaaaaacaaaaaaattacagcatagggcacacactatcatgcattcgcttttctgggccccattttggcttggtgacgtgccaaggtctgctagaaactgcacacactggcccggagcaggcccttctccagttaggtctcaggagtgggattgtagggctgaagggaacttcagtttcaaatccctggagtgcttttcccagtgacgttcttgattcacatctctagcagcaatgtgagaggcttctccgccccccaccagcaaatgtcagggtgggtgcattttcatggtgtgccaatctgatgagggtgacatgagatttcattgtgactaactcagaccccttcccctctctcaccgaccccccgccaaaagtagtgtgtgtgcatttttgagacagggtctccctgtgtcccccaggctggagtgcagtggcgcaatcatggttcactgcagccttcaactcccaggctcaagagatcgtcccacctcagcctcccaagtaactgggactatgggcgcaggccaccatccctggctaattcttttgttttgtttttgtttttgtttttttgagatggagttttgctcttgttgcccaggctggagcgcaatggcgcaatcttggctcactgcaacctctgcctcctgggttcaagcgattctcctgtgtcagcctcccgagtagctgggataacaggcatgcgccaccatgtctgactaatttctgtatttgtagcagatacggggtttctccatgttggtcaggctggtcttaaactcccgacctcaggtgatctcacctcggcctcctaaagtgctgggattacaggtgtgagccactgcacccagcctccctggctaattcttaaaaaaaaaaaaaaaaaaaagaaaatttttttttaaaattactatgaaatgtattatttgttattaagttacaaattttttttttttttttttgagacggagtctcgctctgtcgcccaggctggagtgcaatggcgcgatcttggctcactgcaacttccgcctcccaggttcaagcaattctcctgcctcagcttcccaagtagctgggattacagctaaaattagcccggctaatttttttgtatttttagtagagatggggtttcaccatgctggccaggctggtctcgaactgacctcatgatccacccgcctcggcctcccaaagtgctgggattataggcatgagccaccgcgcctggccagagcccagcctaattcttacattttttttctagagatggggtctctctgtgttgcccaggaccacactcctgccttgccctcaaagtgctgggatgacaggcataagccactgtacccaacctcctcattttgtcctcggactcctgggctaaagcaatcctcccaccttggcatcccaaagtgttgggattacaggtgtgaaccactacacccagcctattgtttgtcttctgaagatttatgtggtcatgcatgtctgtctttttcttcgtagctttcggggttggtcttccttaaagcagttttctgagtgtctaggtaacacttgtctgtacctcagctaactttgttaaatctcagcatcgcctgtagctgcttcagatgtttttattataacattttcattataaaattattagatagttaaaaattatgtttataaagaaaacaatgcggctgtcacattgctgacatgacggtttacgtaactatagtgaagtagtgcacttggtgagggagggaaatgccagcacgcttgggcaaggtgcctcattgcagcctgggagaacgaaggtgggtgaggcatttccctcccacgccgaaggcctccgggaatagaaataccgggtaaatatccactggccagttcgtatcctccagtgggtcatcatgtgattggggagcgcttcttcccattcaaaggggatctttggggacccgggtttatggaaccctctctgcgttggtcctgggggctgcttctctgttcagtgaccctgtgactggagggcactgccttggcccggcgcgtggccatcttgttcctagggtcactggagcctgattgctgtggtggcacgccaggtccttcaaagctttcatgtttttattttattattatttcttttctttctttctttctttctttctttctttttttttttttttgagactgagtctcactctgtcgcccaggctggagtgcaatggcgcagtctcagctcactgcaacctccgcctcccatgttcaagcgattctcctgcctcagcctcctgagtagctgggatgacaggcatgagccaccacgcctgccctattttattattattttaaattttattttagtttcgggggtacatgtgcaggttggttccatagacaaattgcatgttgtgtgggttttgtgtacagattatttcatcacccaggtattaaatagtaagcctcatacccaataggtgatttgtttctgtttttctagcctttccttccattgccggcctttcactttgatctttgctgtctgtttctctttggaaccgctgacttctggttttgctcttgcctcttctcggccccacttgacctccactggggcctgggctagcttgtgtgtgccgccaccatctcggccagctcaggtctgtttctttggaagattctgtgcccctcccatgcctctcctgcatgtggcccatgcacagtagtgtgtggctgccctcgcccttgtgtgtgggttttttgttgtgttgttgttgttttgttttgttttgttttgtttttgagatggagtcttgctctgtcacccaggctggagtgcagcggcacaatctcggctcaccgcaacctcctcctcccaggttcaagtgattctcctgcctctgcctcctgagtagctgggattacaggcgtgcaccaccatgcccggctaatttttgtatccttagtagagatgaggtttcagcatgttggccaggctcgtctcgaacccctgaactcagctgacccacccacctcggcctaccacagtgctgggattacaggcctgaggccctgctcccagcctccttgtgtttctctacgtgcacattgtgcagagcctccccacccggctggacgtgaccgatggcacacgtccccagtctcacgctcctgtgcacgcctcttggtgcctatgtgtgagagcttcgcatttcaactcgagtagaatttgccaaatcccttgccagattgggggcagagctcctcaacagcacttgatgtggtcaccggggtgatctgctgatctgacaggagtgagtgacagtttcattttgtccttgtttgcctttttcagcttaaaatcgaggttgcctcaaaacattaaacatagaattcccatagggtccagcagttccactgctgggtataggcacaaaggagttgaaagcaggagcttgaagggatgcaattcacagcacccaagaggtgagagctggccaagtgtccatggatgaatacatagataaacacaatctgctttatccacacaatggaatattattcagccatgaaaaggaagggaatccttacgcaggctaccacatggatgaacctggaggacatcataattagtgaaagaagccaggacagaaagtacctgattccacttttgggagggacctggtgtcgtcagactcagagacacaccacaggatgatggtcgccagggtggggagagtggtggggagttagtcttttttttttttttagacggagtctcgctctgtcgcccaggctggagtgcagtggtgcaatctcggctcaccgcaacttccacctcccgggttcacaccattctcctgcctcagcctcccgagtagtgggactacaggcgcccaccaccacgcccagctaattttttttgtatttttagtacaggtggggttcaccatgttagccaggatggtctggatctcctgacctcgtgaaccacccgcctcggcctcccaaagtgccaggatgacaggtgtgagccaccgcgcctaacctggagttagtcttttttttctttctttctttttctctttctttctttccttccttcttttgtcctttcctttctttcttctttctcttctttcttctttcttctttttctttccttccttccttcttttctttctttctttctttcctttctttcttctttctttgcttccttccttttcttttctttctttcttttcttccttcttttcttctttctttgtttttttctttctcttctttctttccctttcttctttctttccttcctttcttctttctttccttccttcttttccttctttcttttctttccttccttcctttccttctttcttttctttctttcctttcttttcttctttctttcttctttctttctttgcttccttccttcttttcttttctttctttctttcttctttctttcctttcttttcttctttctttctttctttcttctttttttctttctttctttctttttttttttcagagactcactctgtcacccaggctggagtgcaatggttagtgcgatctcagctcagtgcaacctctgcctccccggttcaagcgattctcctgcctcagcctccagagtaactgggactacaggtatgcaccactgtgcccagctaattttttatattttattttattttattttattttatttattttattttattttattttatttttgagatggagttttgctcttgtcgcccaggctggagtgcaatgcacgctattggctcactgcaacctccacctcccaggttcaggtgattctcctgcctccgcctcccgattagctgggactacaggcctgcaccaccatgcccggctaattttgtatttttagcagagacagggtttcaccacgttggccaggctggtctcaaactactgacgtcaagtgatccacccccactcggcctcccaaagtgttgagattacaggcgtgagccaccgcgcctggcctctacttatttatttcttgtagagatggagtctcaccatgttgcccaggctggtcttgaacccctgggctccagtgatcctcctgcctcagcctccccaattgctgggatggcacacatgagccacggggcccagcctcctcattttgtccttaatatctgcttgtaaccacctcaactcagaatacctaccaaaacttagtttggatgtgtttcccaggttgcaatcctcaaatttggcccaaatacactctccttgtattaattttacctcagtgtgttcctttaggtcgacctcataaaatctggtatgggtaattctgcagagccactccctcaccaccgctgtctcgggccatgctggctagcagcgatcgagggcttactgtggacgaaagtcagtttagagaagttgaatggccaagttcacagcagtaggaagtggctgcggtgggctttgccctggggctttggactttgcctggagctgctcctcactcattccaggaagctcttgcaccatgaccgctgtgacttgggatccaaatttcaattgaaaatatatttttttcaatttttttcatttttaaaatttttttagaaactgagtctggctctgtcacccaggctggagtgcagtggtaggatcacagctcactgcagcctcaacctcctgggcttaagtgatcctcccatcccagcctcctgggtagctaggagtataggtgctcaccatcatgctcagctaatttttcttcttttttctttcctttttctttctttctttttttttttttttttttgtagaggcagggtcttgctatgttgtccagttgtcctgggctcaagccatcctcccacctcagcctcccgagttgccaagattacaggccactgtgcctggcccgatgttttttattggggtaaaatacataataacataaaatgtaccatgttaaccagttttgtggttagttagttcagtggtgttacctacattcgtaatatggtgcaaccaacatcatcgtccatctccggaactcttttcatccttctaaactgaaactctatccccattaaatgctaactccccagtccccctcctgcagcccctggaaaccacccttcaggtgtgccacaggtcaaatgtggacacagggaggccactgcacccggccctcagcatctgaacttccacccctgctgcttgaagctctccatctcgccgtccagacaggctgccttccccgctggctctgtataggatgcaaccccaacaggtggagaagctcagcccgcagcacccacacggagccgagatgtgcaggttgccgagccggccccgctgggggggcttctgctgggacagacataacaaacagcagatgtagccccctgccgaggacttcagattgggaattgtcagagattccggagattgtcagattggatggaaacccccacttccagcatatgctgtttactagagacacacctcaaacatatgtccatggaaatattacatgtgaaagaatgaatgctaggcagttactaccaaaagcaagctgccatggctatattaacatcagacaaaataggctttgggacaaaacaaaaacagtttaggaatgatgttaaaataggctctacatatcttaagcaaaagttgacagaactctagggagaaataggcacatgaagcatcgtagagggaggtttcttttttttttcttttttttttttttttttttgagacagagtctggctctgtcgcccagactggagtgcagtggcacaatctgggctcactgcaagctccgcctcacgggtttgagggattctcctgcctcagcctcccaagtagctgggactataggcgcccgccaccacgcccggctaattttttgtatttttagtagagacggggtttcaccgcgttagccaggatggtctcgatctcctgaccttgtgatccgcccgcctcggcctcccaaagtgctgggattagaggcgtgagccaccgtgcccggcttgcagttttcttttttaaaatgtttatttctattttgtgattcaaactgaggatcatcttgctgcaaagaagtttttaagttgataagaaactgctgaacagtgattcaaagtggctgtgccatttcacactcctgctggccgcgtgcgaacctttcatgcactccgcctcctcaccagtgctccctgcgaccagtcttcagtgacagtcattctgggtgcgattttatcttgcatttccccatgagaaatgggcatctcttcctatgcctcagtggggagaaccagagacgggggcagaagaggggcaggagaaggcagggagggtggttggaggagagagcattgggtgggggtggcaagtgctggaggagggggacggggaagtgggccctttgctcttgaaccattttaaccccaagcaaggtgcattcagggtttgggcaggggtctggccctcatgtcaccagatcctgagtgactgtaggggcctctcatcatgtcttcactcctggacttgctggctccaggtgagaagacgtggacactgctgtgggctgcagaggtttgggggtgtgtgtgtgtgtgtgtgtgtgtgcatgtgtgtgtgtgtgtgtgtgtgtgcgtgtgtgcgtgtgtgcatgtgtgcgtgtgtgtgtgtgtgcatgtgtgtgtgtgtgcatgtgtgtgtgtgtgcatgtgtgtgtgtgtgcatgtgtgcatgtgtgcgtgtgtgtgtgtgtgtgtgcatgtgtgtgtgtgtgtgtgtgtgtgtttgagacagggtctcaccctttctcccaggctggaatgcagtggcgcgatctcggctcactgcaccacggacctccgggctcaggtgatcctcccacttcaaccccctgaataactgggactacaggcgcacggccccatgcccagctaattatgtaattatgtcacttttcatagagacggggtctccccatgttgcccaggctggtcaggaactcctgggctcaagcgatccacccgtctcaacctcccaaagtactaggattccaggcctaagccactgtgcctggccttcagggttttaaggaacagtttcatttccacagtggggcggcttgagaagtaggggcaccccaccagcagctgagcagagaagaaatggtggctatcagacagcccaggcctagtgaatcctccagtgaattattcctggcctttaagagacaggtaattccagcgaggcgcagtggctcacgcctgtcatccaagcacttcaggaggccgaggtggacggatcacgagatcaggagatcgagaccatcctggctaacgcggtgaaaccccgtgtctactaaaaacacaaaacattagccgggcgcggtggcgggcgcctgtagtcccagctactggggaggctgaggcaggagaatggagtgaacccgggaggcggagcttgcagtgagccgagatggcgccactgcactccagcctgggcgacagagcgagactccgtctcaaaaaaaaaaaagaggtaattccagggtttcaaagaaagtaaagtttccagatgtgctttatgaagccagaataacctttgtcccccaggagaatgttagtgtcacaaagacagactcttgtgggtcctgcttgcttctccgctctgagtccacagcggtgtctggcacacagtaggtactcctgggtgactcactgaatctggttgcagacttgacacacacacacatgcacacacggaaaagtatcgatactgctgttaaacactggtaggcatttctaaaataaaaacattagctaatatcatccaaaagcagatcaaggcatgaatatccaggctgggcgcggtggctcatgcctgtaatcccagcactgtgggaggctgaggtgggaggattgcttgagcccaggagtttgaggccagcctaggtaacatggtgagtctgtctctaaaaaaaaatacaaaagttaggtggggatggtggtgcgagcctgtggtcctagctactcggaggctgagggagaattgcttgggcctaggagtctgaggctgcggtgagccatgatcacaccactgcactccagcctgggtgacagagggagacctgtgtgaaaggaaaataaatcttggggcccccaaatcactcagctaaagggaaaactcaagctgggaactgcttagggccaacctgcctcccactctattcaaggccactcctctgttcactgagataaatgcttattggattgcttcctttggagaggctcatgagaaactcaaaacaacacaatcattggtctcttatctacccatgacctggaagccccctccccacttcaagttgtccctttctggaccaagccaatgttcatcttacatatgttgactgatgtctcatgtctccctaaaatgtataaaaccaagctgtgctctgaccacctcgggcacatgtcgtcaggaccatcctcaaccttggcaaaacaaactttctaaattcactgagacctctctcagatattcagggttcacacctgactcttaaaaaaagcaaagaagtgaataaactataaccaaatgtacacaacatattgttattaaccatagtcacgatgatgtacaacaaatctcttgaactaattggaattcctcctaattggaattttgaatcccttggccaacatctcctcatccttccctccccacccaccaccctgcagcccctttatgagttcagcttttttattttctacatatcagtgaggttgtgtggtatttgtctttttgtacctggcttatttcatttaacatagtgttccccagtttcacctattttgttgcaaatgacaggatttccttctcttttatggctgaatgggattccgttgtgtacagatatcacactttctttatccattcacccattgataaactcttaggttgattccatctcttacctgttgtgaatagtgctgcaatgaacacgggagtgcaggtatctctttgacatggtgatttcaaatttaaatatatacctttaaatatataccaagtagtgaaattgctggctaatacggtagttgtgtttgtagtttttggactatactgttctccgtactgtctgtgctactttacattcacaccaacagcgtacgaggttcccatttccctgcatccttgtcagcatttgttatttttttaaacatctttttgttaaaagccattttaactggggtgagatgatatctcgtggtgcttttgacttgtgtttccctgatggtgagtgatgtggagcattttttcatagacctgttggccatgtctattcagatcttttgcccactaaaattttctttttttgagacaggacctcactctgtcacccaggctagagtgcggtggcatgaccacagctcatgcagcctcatcctcctgggcccagtcaaccctcccacgtcagcttcctaagtagaaaaaggccagctgtggtggctcacccctgtaatcccagcactttgggaggccgaggcaggtggatcacctgaggtcaggagttcgagaccagcctgaccaacatggtgaaaccctgtctgtagtaaaactgcaaaaattatccgggcgtggtagtgggcacccgtaatcccagctacctgaggctgaggcaggggaatcacttgagcccacggcacgtggatcacctgaggtcaagagtttgagaccagcctggccaacatggtgaaaccccatctctactaaaaacgcaaaaaatgagccaggtgtggtggcgggcccctgtaatcccagctgtctgggaggctgaggcaggagaatcgcttgaacctgggaggcggaggttgccgtaagccaagatggttccactgcactccagcctgggccgcaagagtgaaactccatctcaaaaaaaaaaaaaaaaagtgaaatctgcagagatgacagcttcatgagctgattgtatgaagccacaaacagtactgtgcttaatggtgaaacaccacagcattttcattagtcaagaatgagacaatattcccaggatcaccactgtttcttcccgtttcccaatgttaaattggccaatgcaattgaaaaagttagccggacgtggcgcacaaggaatacgtgttggaaggatgaagcaaagttctcattctttgtaaatcacttgattgcaccactgaaacgtcctctggtctgctgggcaggtttgagtcaggagattctggctgtcttcactgggcctatctgagactgggtgtcatttgctttgctcttgtctgattttactgtcagacatcactcctgtaaccagtctttgtagtaagtctcatttcttgcatgtacttggaagtacatgcaataaatggttttattttcccagcgactgtgcccgcccccaccccattgagttgtgccaaatcccccttaagacgtggggcccgagtccatcatgtttcagtcaggttgcttgtaattagtcttattctggttcttttttcttttcttttctttttctttttttttagacagagtctcgctctgttgccaggctggagtgcagtggcacaaactcggctcactgcaacctctgcctcccgggttcaagtgattctcctgcctcagcctcccaaatagctgggactacaggcttgcaccaccacacccagctaatttttgtatttttagtagagacggggtttcaccatgttggccaggatggtcttgatctcttgaccttgtgatctgcccgcttcagccttccaaagtgttgggattacaggcatgagccaacacgcccggcctggttgtcttttcttttctttctttttttttttttttttttttttttaagacagggtctcactctgtcacccaggctggagtgcactgatgagatctagactcactgcagcctcaacttcctgggcttaagcgatcctcccacctcagcctcccgagaagctgggactacaggcgtgcaccaccacgcctggctaatttttgtatttttagtagagacagggtttcttcatgttggccaggttggtctcaaactcctgacctcagctgatccacctgcctcggcctcccaaagtgctgggattacaggcatgagccacgactcccggcctacccttaattttttttttttgaagtgcacaagctaattttttaattactatttgtagagattaggtctccctgtgttgcccaggttggtcttgaactcctgagctcacgcaatccatctaccttggcctcccacaatgctggactgcaggtgtgcaccacgctctggcatcattctggttcttaaacccaagggtacttattttccaacatgaaccttaacctcacccttccagaaacttctcaggcatgggcaaggttgcagtctcccttactgcaggcagcaatgactttagcaacaggtgatcttggtgggctcgtaggggagtgggaatgggcagtggcttttgtcctccttttgttgtccgctggggatcttggttgggaagcctgaacccagcattgtttcctagccctgtgttcaacaatgccgggagcgaggtgccttcctatccccgtgataaacagttctgggacctgttgctctgccacacaatcctgagaactagcacaagtcaattcgcttgcaggaccaacacacccatgctcctgaaagatgagactcgcagagcccggcccgagactgcacccagccgtccaaggctgaccatgcttcccacccggccctccccacgccggctcggacttcgggcattttctctcctcctttcctccctggtgatctgaggccggctctgtcgggggagtgttcttcctctttgcagtgagtccaataaactcagctttgcctgaacaacaggtttttctggtggtgattttggggagtctacagccaacagctgaaattgggaaaacggggcgggggtggggaatccctttttgttttttgtttttattttttacagtaaagtgaaagcaagtttattaggaagatagaggaataaaagaatggctgctccatagacagggcagctgggaatcccttttagcacctggtggctgcagatgggtagaaatacagaccatatttggttcttagtttaattagccagagacgcagaacagggtgggaagccagacggccacacctagcacctcatcaggctgcagccaaccagggcctctcggggctgggaaaactcgattcttgctgtacttgggcttactcggctctccatcttatgcaaacacctctccttatgaaaggcaagaagaatttgttctacactggggatgggttgtgcctgtcacatggagcagcctggggacctagagggaccctttagaagcttagcacctagcaattccttttcacatgtgactcatggtctattcagttttagtacttcttttttttttgacagagttttgctctgtcacccaggctggagtgcaatggcgcgatctctgctcaccgcaacctctgcctcccaggttcaagtgattctcctgcctcagcctcccaagtagctgggattacgggcacgcgccaccacgcctggctaatgttgtatttttagtagagacggggtttctccacgttggtcaggctggtcttgaactcccaacctcaggtagtccccctgcctcggcctctcaaagtgctgggattaaaggcgtgagccaccacgcccggcttttttttttttttttttgagatggagtcttgctctgtcgcccaggctggagtgcagtggcaccatctcagctccctgcaacctccgcctcttgggttcaagcaattctctgcttcaccctcccacgtagctgggattacaggtgcccaccaccatgcccggctaatttttggatttttagtagtgacggggtttcaccatcttggccaggctggtcttgaactcctgacctcgtgatccatggcgcctggcctactacttctttattcatttattttttgagacggagtctcgctctgtcacccatgctggagtgcagtggcacgatctcggctcattgcaacctccacctcccgggttcagcttcccggatagctgggactacaggtgcgcgccaccacgcccagctaatattttgtattttgtaagtagagacgtggtttcaccgtgttggccagggtggtctcaaactcttgacctcaagtgatctgcctgcctcggcctcccaaagtgctgggattacaggcgtgagccactgtgcttggcgcagttttactacttcttgagacaactctgaagatttctatttttcacagaaagtcattcagttaatctagacttttcaaatgtattgccataaagttatatttactattttaaaattttaatttcctccttaacccaacatttatttaaaagggtcatttcagccgggcgtggtggctcacgcctgtaatcccagcactttgggaggtcgaggcaggtggatcacctgaggtcaggagtttgagaccagcctgggcaacatagtgagaccccatctctacagaaaaataaaaaattagccgggcgtggtggcacacatctgtagtcccagctcctcgggaggctgagatgggaggatcacttgaacctgggaggtcgaggttgcagtgagccatgatcgcaccactgcactccagcctgagtgacagagccagatcctgactgctgctcatagagatctcgcctaaagatcttgcctaagtgcaaaaacacacacacacagaaactggaacaaccgaactgaccctttggggaggctggcgaaataaatgacatggagtacattcatacagctctaaaaaaggacaaaagtcagggacatctgtgtccagggaacactctcgatttgtcttgttaagtgaaactggcgaggcgtggaatcatgagagaagcgtgagtagaggggacttaaaccagggactggtggccacagctagtgttagccaggggactggaggctgggagactgagaaggagattttcttacttcgtacgtgtctgtactgtttggattttttttttttttttttttttgagagggtattttttaaaaggaaaagcttgttttgtttttctttttaaaaaataggctctaaaaattctggagagaaataaaaaaggcaacatggtggccgggtatgggcgtctcttctgattccaggctggttggcactggccaccttgctcaatggttgccttagaaaccggcctagcgagggggtgtcagttgtctctggtagccattaaggcagtgactcagcagaaaacccaacccaagagggagttgttcattcactgactttccttctctcccagaaaagcatgggtgaggccatttctgttacatttgcgatcgggtggcagctgctccgccgtgaaggcggtagcgagaagtctgcccgctcctccagcctctcactaggtgagtggcgtctctgtgctgccctgtccctcagaaaccacaggttccggtccctctgccagcctgtcccctgtctctcccctcccgctgacagggtgaaaccagcttccgctcacaagcacttgctgggggttgccacaggcatggctcttggggagatctttagtaaaaaacccaaccaaacatcacgagtggaaccgagtgtggatcataaactcaactgagagaaaagccaagggacgcatgtgggcaaaatacacagaaaacccagcatgggcgcgggggctctcgcctgtcatcccatcactttgggaggccaaggcgggtggatcacttgaggtcaggagttcgagaccagcctggccaacatggtgaaaccccatctctactaaaatacaaaaattggtcgggcatggtggtggacacctgtaatcccagctactcgggaggctgaggcaggagaattgcttgaaccggggaggcggaggttgccgtgagctgagatcacaccactgcactccagcctgggtgacagaatgaggccctgtctcagaaaaaaaaaaagaatcacgtgctgagacatgctacaacacagatgaaccccaaaatcataatgctaagtgaaagaagccagacacgaaagatcccatgagtattatcccatttatatggagtgttcagagtaggtgaatctatagagacagaaaggagatgagtgactgcctcagctggaagggaaaatggggaagaaatgggtagtgactattaaaaggtatggtgtttttttttctttgtttttgttttgttttgttttgttttattttgtttttttgagatggagtctcgctctgtcacccaggctggagtgcagtggcatgatctcggctcactgcaacctctgcctcctgggttccagcaattctcctgcctctgcctcctgagtagctgggactacaggcgcccaccacgatgactgggcaatttttgtatttttagtagagatggggtttcatcgtgttggccaggttggtctcaaactcctgacctcaggtgatccacccacctcggcctcccaaagtgctgggatgacaggtgtgagccaccacgcctggccagtgtttctttttggaatgatgaaaatatgctcaaatagagtgctggttgcacaagtctgtaaatctattaaaaacacggagttgcacacttcaaacaactgaaccttgtggcgtgtgaggtagatgtcttaacacagctgttaaaaagcccaggatagctgggcacagcggctcagctgtaatcccagtactttgggggggctgaggaaggaggatcgcttcagctcaggggcttgagaccagccttggcaacctagcgagaccctgtctgtactaaaaataaaaataattagctgggcatggtgacatgcacctgaggtcccaggtactcgagaggctaaagcgggggctgtgggcaggagaacaaggctgcagtgagctatgatcacgccattgcactccagcctgggcaacataatgagatcctgtctcaataaacacatgaaagagacacatactgttatttcaaacttcactcaaaatacactgccttctatgtgctgggacccagagagggtttgtggcatgtttgtaggaataagtccggatcagaacggagctgagaatgggtgttcactcgtattcttcaatgtctcctattgagatgatgttatccacttgttattttcttgaccctattttctgccaagaaataaagtaatttgagagagagagagagagcgagatctaacgtggaaaaacagatctgcaggaaggcatggaacgcactagaaaggtaaaaaatgggctgtttagaccaacactaatagtgtcctttgggatttaaaatatacgaaaacaagagcacccgaggcccggcggaaacacagtctcgctgctgggaggctctggcgttgcttgagccactgcaccgcagactcaatccctagggtaactgctggagtaataatgaaaagtgacactgagaaaaggcaaaaaaagagaaagaaagtaaccaacgacagatgggacaacagagaacaaatggtaagctggtcctcacacacagccagagcaggagggtggcgggggtcagggtctaatggtgtggaggaggaggaggaggatgttgagggtgaagaaacaaagcccatgcccccgagttgtacacttataaatagttaaacagatgaatattatgttgtatatattttatcacaataaaagatctcacatacagccatattggcaaatccattaaaatgaaaatggataaacacacaaagattgccgggctggcgtagagggaaaataaaaccaatcaatcaatatgctgcctcaaagagacattctttctttcttcctttctttccttccttccttcctttctctctttctttcttttttgacagagtctcactctgctgcccaggctggagtgcaatggcgtgatctcagctcactgcaacctccatctcccggattcaagtgattcccctgcctcagcctcctgagtagctgggattataggcgtgcaccatcataccccactaatttttgtattttcactagagacagggttttaccatgttggccaggctggtctcaaactcctcacctcaagtgatcttctcacctcagcctcccaaagtcctgggattacaggaatgagccaccgtgcccggctgcattttattttattttattttatttttgagatggagtcttgccctgttgcccaggctggagtgcagtggcgtgatcgccgctcactgcaagctccgcctcccgggttcacgccattctcctgcctcagcctcccgagtagctgggactacaggtgcccgccaccacgcccggctaactttttgtatttttagtagagatggggtttcaccatgttagccaggatggtcttgatctcctgacctcgtgatccacccgcctcggccttccgaagtgctgggattacaggcgtgagccactgcgcctggcccattttatttcttaaaaacagcttttttttttttttttttttttttgacagagtctcactctgtcgcccaggctggagtgcactggtgccatcttgactcactgcaagctccatctcctgggttcacgccattctcctgcctcagcctcccaagtagctgggactacaggtgcccgccaccacgcctggctaattttttgtatttttagtagagacagggtttcaccatgttagccaggatggtctcgatctcctgacctaatgatctgcctgcctcggcctcccaaagtgctgagattacaggcgtgagccactgtgcctggccaaaaacagctttattgaggtataattgacataaaataaactgcacatttaaagtgaacagtttgaaagttatatctgccaaaccatcaacacaatcgagaatgaacccaccaggccaggcgtgggggctcacgcctgcagtcccagctacctgggaggctgaggtgggtggatcgtgtgagcccaggaattcgagaccagcctgggcaacatggcaagaccccatctctacaaaaaatacaaaaactggccggaactgggatctggaaggcggaggggacgcagtaggcatttgtgcactgtgagtcctggtgtggggccatcgcagcactgccagctcccatcaggtctccctgatcagatgttccaacatgtgtatacagatgtgtacaacacccaagagaaatgagtgtgtatgtgcagcaagacagattcggaaatgttcataacagctttatgccagccccaaactcaatccaaacgcccaagagtagaaagagtcaaatgcggcccattcttacaatggaacgctacctgggaaggcaaagcaatcgcttagcgctactcacggctgcaacagaacaacagtgcagagcaatagcaggcagacgcgagttcgtaccacgtgtgttaatccattctcacactgctgtacagaaatagccaagaccgggcaatttatatagaaaggaggttcaatgggctcacggttctgcaggctgtacaggaagcatggctgcatctgcttttggggaagcctcaggaagcttccaatcatggcgggaggcaaagggggagcaggcacatcagatggccacagcgggagcaagagccggacagtggaggtagcacacactgttaaacaactatcatgagaacagcacccagggatggcgcggaagcattcatgagaaatctgcccccatgacccagtcacttcccaccaggccccgcctccagcactggagattggggcagggacacacatccaaactaaatcacgacacaatctcattgacatgaaattccagaacatgcaaaactatctatgtgtttaaagccaggtttggatgttctctggtgctactctcatcaaaaaaggcggcccacagcgcctctccccttgcatacactggcctcagaggcttgcgtctagtgagcaggctgccggggaagtggcagcacctgatccccaggccaggccatcagatgacgtggcctccgctgggctttctagcttgagatgctccccggagaacccagcctcacaggcacatggaggtgtcctcaccccggcagcgtcctccgctggacacgaaggagccgctgggtggttccagctcgtggccatcgggctgccccggctaaccgactgcagcgggtgagctctgccaactgagacctcacagagcacaggctcgcgagcaaaacaaacattgccattattttcagcccgtacatcttggggtggcttggtacctagcaagagataactggagcagattcatatgtgggtctatgtggtggctgccacatggccgtgtacatataaaacagtcattgggctgtacgagtacggtttgtgtacttttctacctttaacttatacctccctaacaaagtctttcagaaaagcctaactcctgaggctctggtgtgggcagctgggtgggcgctggaactagtcccacacgctgaggtgggaagctcatggtgaaagggaatcccaagtctgcttggccatctaagtttacggtgcctgtgagaaaaatcagaaggccaaaacctcaggagagagagcatgacggaggcgctgccgtttgggaatggacatgatagagccgtgagaatgaggaagatcaccgtcgggaatgagtgcaggcagctaagaaggcgcagaggcgtgtctggagggactcacaccttgtagaggctgggtagagagagcccacgcacgctgagaaagaacacagacttcagcgtcacagaggtcacaagagacaagcggttggtgggggagtaggcaccggcgagagaaagtccaagaggactggatggatttgacaacacggagatccctggtgttctggatgaacgctgattggatggagtggcaggggtagaagcagaggaagagggactgcacagggaatgggcaagtgagaaaacagacaaggattctgaaaagtttagctacaaagaggaacagagaattagggttgtggttggagggggtgttgggtcaaatgagtttttatttttattcttcaagaacggaagctaccaggacatgtttgatgaaaatagatccagaggccgggcgcagtggctcacgcctgtaatcccagcattttgggaggccgaggtgagcggatcacctgaggtcaggagttcgagaccagcctggccaacatggggaaaccccgtctctactaaaaatacaaacattagctgggcttggtgacacatgcctgtagttccagctactcaggaggctgaggcaggagaattgcttgaacccgggaggcagaggttgcagggagctgagatcatgctgctgcactccagcctgggtgacagagtgactctgtctcaaaaaaaaaaaaaaaaagaaaagaaatagatccagaagcaaggaagaaattgatcatgtcgggtgacattatgagtgaagaagtcctcagaaaagaggagaaacttgcaattctggccacagtggaataactgatgccagttgtaaacacctaaaacactgggcaactatttttagatatcggacaataggctgtgcagggctgtgaccagagagaaaacaaagaaggtgagccttacaagtaccctgagtttctgcctggaggcactttcacaccatggttcagcaaaggggcctgagcggaaccagcagtctcactgaattactagagcgaccaagccaatagcagagaaaaaacagaatcccagaaatatgtaattaatccaaaagtcaaaacagatggggtaatagaaaacaaataacaagatgatagacttaactccaaccattaaatggaaatggattaaacagaccaactaaaggcagagattgtcagattgtttaaaagaataaggctgggctgggtgccacggctcacacctgtaatcccagcactttgggaggctgaggcgggcagatcacttgaggtcaggagttcgagaccagcttggccaacatggtgaaaccttgtctctactaaataaaaatataaaaattagctgggcgtggtggcacacacctgtagtcccagctactatggaggctgaggcagaagaatcgcttgaacctgggaggcggaggttgcagtgagccaagattgcaccactgcacttcagcctgggtgacagagtaagactcttgtctgaagaaaaaaaaaaaaaaaaaaaaagccgggcacagtgcctcatacctgtaatcccagcactttgggaggctgaggtgggtgaatcacctgaggtcaggagttcgagatcagactggccaacatgttgaaaccccgtctctactaaaaatagaaaaatcagtcgggcgtggtagcggacgcctgtaatcccagctactcgggagactgaggcaggagaatcacctgaacctgggaggcagaggttacaatgagccgagatcgcaccattgcactgcagcctgggtgacaagagcgaaactccatctcaaaaaaaaaagtaaatatacagacagccagggacaggtgcagtggctcacacctgtaatctagcactttgggaggccgaggcgggcggatcactggaggtcaggagttcgagaccagcctggtcaacatgtggaaaccctgtctctattaaaaatacaaaaaaattagccgggtgtggtggtgggcacctgtaatcccagctactcgggaggctgaggcaggagaatcacttgaacctaggaggcagaggttgcagtgagctgagatagcgccattgcactgcagcctgggcaacaagagcaaaactccatctcaaaaaaagaaaaaaaaaaaagaatttaaacaaggtcacagaatatacggttcatatgcaaaactcaaccgctttttttttttttttttttttttttgaggcaaggtctccctctgttgcccgggctggagtgcagtggtggaatcatggctcactgcagcctcaacgtcctgggctcaaactatcctcctgggtcagcctcctgagtagctcaaactacaggcatgcaccaccatgcctggctaatttttgtactttttgtagagacggggtttcgccatgttgcccaggctggtctcaaactcctggcctcaagtgatctgcccgccttagcttcccaaagcgctggaatcacaggcgtgagccaccgtgcccagcatcaattgcatttctgtataatatcatgatgaactagaaaatcaaagataccatttagaatagcataaaaaacatggactacatcaggaaaaacctgacacgggaagtgctgggtgtggccagcccagagtagtaacaagaccctggacgctcaagaaccctgaagtgtaaggcatcaggaaagctcaaggctttcggtgcaacaaagtccacaagtagagcccgagattgcaacatacgtttttattactcaaggacaacctggacgtcaccaatgcccagcttcacgggggcatgtagtgtgactcacggctgaacacaaaatcactgtgaagcctgtgctacagccctgggctacttttggacacgcaagaggacactcggttacatgaaacctgacttgcttctgaagacatgtgatacatgtcttttccctgaaaatgtttcccttccctgtctgccatgctcccaacttttctgccttccaggggcttctcactgtctgggtaactaggtcttgggcctagctagaccttgggtagtggcccctctgccacaatcagtgcctgggcctgaggctgagcttgtggcctccgaagcctgacctggctcggagctcgtctgtggcgcccagggatggcctggcttgcaggccaccacattaggccagctcgcaggtccccagtaaagcctgaagacactggcccgaggttggaggtgggtgctgctcgactttctggaggatctcagaattctcgcttcttgctaggactgaaccatgagacttacagccatacttcacttttcccagggtttttctttttgaaacagggtcttgctctgtcacccaggctggagtgcagtcatacaatcatgactcactgcagcctcgacctcccaagcataaatgatcctcctacttcagcctccccagcagctgggaccacaggcgtgcgctaccacgccaggctaatagtttaaaaaattttttggcagagacagggtctcatcatgttgccctggctggtcttgacctactgggctccagcgatcctcctgccttggcctcccaaagtgctgggattacaggcgtgagccaccgcacccggccacacttttccaaattgtaagcaggtaggagggccctaggcctcgtcggccccattgtgcagggtggccactgtccaaagagatgggcaaagagctgctgccagaggcctgggctgcagacgccctgcatggctctcaggggagccagctccctactccacacccctgcacagcagcccctctcctcccctcacgggtctgtgcagccagcagcctcccaacatgcgccagcctcctcactggatgatgccagccttccttgcccccagatgctggcatggaggcagggttccactctgcctgcctatgcccacagagcctagaacagcagggccacctccttctctcccccgcgggcatgggcccccacccccactgccggcagagtgctgaggactcgtgcaccatgagaacttctgaccatgagaactttgacttccggatttgggggatctgcccaggtgaacacatcagctctgaaattcatcactttcttcgggcccctgcctgtcctgttccaggcccaagcctacagaaggaagaggaaagtccgcttagcaaatgggggaggctcccctactgccagaagccctggctcaaggcctgggccatgctcccttatctcctggggcgttcgtgggaattgagggtttttgtttgtttgttcatttgtttttgagacagggtctaactgtctcccaggctggagtgcagtggcttgatcacagctcactgtagcctccacctcctgggctcaagtgatcctcccatcttggcctccaaaagtgctggtattataggcatgagccacctcgcccagctgagggttcctaagcagtggttcttcaaatagtacctgggatggaaaattcctgctggggcttcctatttcctgaaagcacagagtggggcaggcaccctcgggctaaaggaggtgctactgtcaggaggcgagggaaggagtgggccagggtcttgctaagggaggcatgtggggccggctgggcttctagaggtcgccagagccagtggcctgcccggctgccccacgccctcagcgcagtcgggacagacactctgctctttggggctgacacggatgcgcctgagcaccccagaggccagcctgggcggcagcacctgggagggagctggacgacagcagctgcaggctgtccagggccccatcctcgtacagggccagcttctggaccatcttctgtcgggcagggttgatgataatctgcggtggctctgacgacgatgatgcagagctgccaagggccagtcctggggtggagatggcactcccttagcctcatgctgtggctccccagcccgcagcctagcaccctgcctccctggcctcaggcctgaattcctcagagaagtccaagggcagggcccagctctcaggctaccagacagagccctccttgttcccagccttcaggaatggggtggggggagggctggagagcaagctccacctgggaaggatgtggcctggggaggggaaaccagggttgctaaggtcacagtgagctgaacatttggccctggttctcttctagaaggctggggtggggacttacaggggctttggcccaaagaggccttggtccctctcctgggaacccgtctccccagctaccttccacggctgtgggccgggatcctgggccactcccccagctcgattctcctgccgtgtccccctgaggacagccggcctccctgaggggtgctgggtccagagggcagcttggagtcaagtgccaggagcgcagggcagcagagaggccgcctaggctctcgtcactctccacgggctggttggggcctctctgcagctgctctgctgcctgggcactggctcctgatggcgctgccaggggctgccatggagcagccccactgtgggctctgccagtgctggacacgtaggagttctcctgcggggaaggggggatgcagctggcggcctccgaatgcccgggcacccccgccaccactgcctgcagcttctctagcctctcgtacacctgcaagtggaaaagagggactctcagggtgagatggcagccctggccggtcaccccgtgggcaaaccacagggctgctccaggccgtccgtgacctgccccagggctctaaaatgacataccctgcagctgggaacgctctgcccctcgcccctctgttcccatcacagggagtgctgagaagcgcggctgccaaaagcaaggactgagaatggcctcgttcttttctacaaaatgaatctcactgccccgctgccctcaaacggggcctctccattttcaactgtcaccagaggagaagaggtggggtactagggaggggacagaaaaaggcagatgcagtagtgcagtgcgcccagcagggggcgcggcagcagctctttccttctctctatgtgaagggggtcggagctgggctccgcaaagcaggactgcccggggcccctcagttcagaggggcgctgccccaaacagaaccaaagggcaagcaagaaatgtgtggagactccagagagacctagcaggtgctgagatggggtcactacagagcaaggcctggaatgcgggctttctatctggccaccccgtcccagtgcgcagctggctacctgggtcataggaggcctccttttggcccggcggtgcaggcagcagcaggccagctggcccaggcccaggcccagctcaggtgggcagggcccgggcctggggtccaggtgcttcttgtagatctgcatggcgatgggagcagcccaggcatctgcagccagacctgcttgcagtgtgctctgggtgcttctcaaagccactccagcctcctcagcctcctcttccaccaggtctttctgtgggataaatactgtcagtatggctaccaggtggccacacctgcagctgcagtcctcaggtccttgtcactcaatcgtatgggttttgataaaaaaaaaaaaaaaaaaaaaagagatggggtctcgctttgttggcctggctggtctccaagtaggctcaagtgatcctcccgcctcagcctcccaaagtgctggtgttacaggtgtgagacactgtgccacagctcttggtctttctacaacttactttttttctgagacagggactcattctgtcacccaggctggagtgcagtggtgcaatcatggctcagtgcagcctcaacctcccaggctcgtgatcctcccacctcggcctcccgagcagctgggattacaggtgtgtaccaccatgcctatcttgctatgttgcccaggctggtctccaactcccaggctcaagcgatcctcctgcctcagattcccgagtagcttctagagatttattaaacacctactgtgggccagtggtgctctgggccctagggatacaggaacaaacagaaccctgggacccggtttgacagagctgacttcctggtgggggagagccccatggagctggggtctgaaggcaggaagtagcctgagagggcagagccgagaaggaaagcgccccacagagaggtgccccacagacaaagaggtaccccagagagagaggcgccccgcagagaggcgcccccagggtggaaacaggaccggaggccatctccagttctgaaatcagacagaccaggaggaaccacctgggtgggcggtggcttttctcgcagagcgaacggcacatactaaggctgtgaagcaggcagcagggagcgccccgagtcccagggacctggggcgttggggggtcaaccacataagggactgggccttcaccccaagagcagagaaaaggcaaaggggcctttgaaaagagcactttggctgcagggtggggagcaagtggggaagtccaaggacccccaaggagcctggtgcgcttcttcagcaggatgcatggatggacggacggggaagggaaaggaaggagggctcaagcccggctcctgggttctcagcggggctgaatcctgacggagaccccacagcacacaggaaccgccccaaacaagaggagaagcagtgaagcaattactggctgagcacattctgtgaagtctgttttgcatatgggaaaacaggcccacaggggagcaggaatttgctggaaggccactgtcaggctggggctaaaacccaggtctctagtctcctggccccaccacagtccacggtgaggcagactgagtggagtaagaccgtgaggcagctcaggctgccctgcacggtgcggagagctcagctgcagcctgctggggcccaggaggttcctcggggcctgcttcttctctaccaccgcctttctccggccagagtcctctgagttccactgcagcttgggtctcagtgccctgggaccgcccttccccctgcccccagcccaggtggggtctgtacaaggcccatagtgtctgcaggacagacaggtttgtcctcggcaaggtaaacgaagttgtttggagccctgcctactttcaaaaatgaggccactgtggcagcagaggcatccatgggcactgcgccccagttatccccgccactggggctgtgcctgctggctgccagcagctgtgtgtccctcctggccctgcctcaaggggctcaccagatacttggtcctggcaccgtgcgtcttcacagccctctgaccagccaaggtctctagcactacctggagagagggaagagggagagcatggcagtggccttggcagggaagaggcctctggtgtggacatggattgggcctgacaagggtgtggacaaaggcagagccagatgttatgggactgaagctcgggcaactcggagagcccacttgaagacaaattacaaacacacagttaggtgcagggtgaggaggagggcctcggagggagggggaccctggagctgcagcctcctggggtcttggcagatggcccctggcccgcagtgcactctgcagcccccacctctgcctgcctgtggcttctcctcctctgagccagcagaggggtcagtggctcaccaccccaaagctgaaggtgtccgtgtccacagccagccttcccgtcttgatgtactcctcgggcaggtaggccagggtgccccgcactgtctgtgtccgggccaccatgctgctctggctggggctggacccggcaaagcggctgaaccgggccaggccaaagtctcccagcttgggtgtcagcctctcatccagaaggacgttggaacttggggagagaagacagtggcgtcagcccggtcctagctcctacacctgcccggcttagataaggctggactcgaggctgccagcccggtgccttgcccacagaaagcgctggcactgccctgagcgctccagctgcctgggggcctctgctcatcagtagggcccatccttggcccgttcccacacctgtgcgatgccggggtgttgaggtcccaggccatgcctgatccccacattgataggacgcggggccccccttgctgcaggccctgccccggcagttctcaagggcccctcctcacctcttgatgtctccatggatgaggctggggctgtcctgatgtagaaactgaattgcccgggctgtacccagaaggatgtccagtcgctgaggccaggagagaggtgggcaggcctgggtctggggtggcaaagggggacaggggaggttgctggatggccgttccttgatcccaaccatccttctacctgtcaccgtgcagcctggaacagccacttcactctctaggcctcagtttcccccttctggaaaacgaggagcaaagtctccgtgacctgcacttcttaagcaatggctggggacacgttcaatagaatctgctgggcttcggctcccagggctcatccctttgtccctggtggtcgggaagtccttgaaggcattcttcccgctctccccaaacgcagcatgcaggaggaggcaagggggccctccctcagctgtaggtggtccagctggtagccccagaccccctcgcctccggggcttgctgatgagaccctccagctacgctgcttgcaaaggggagaggcctgggaaagagctctatagaaaacattgggtcgggccaggcgtggtggctcacgcctgtaatcccagcactttgggaggctgaggcgcgcagaccacctggggtcaggagttcgagactagcctggccaatgtggcaaaacctcatctctactaaaaatacaaaaattaggcaggtgtggtggtgcatgcctgtagtcccagctactcgggaggctgcggcaggaggatcgcctgaacccgggaggtggaggttgtggtgagctgagatcacaccactgcactccagcctggatgacagagcaagactccacctcaaaaaaaaaaaaaaaaaaaaaaaaaaaaaaattgaccccaccgtgggccaaatcctgagccgggtgctgctggggagctggaagtgcaggcctggcctgctggcaggacccactcacacaggctgaaagccctaggccccgcgcccggctccagccaggtgtcaggagtgctttgggtcctgggaagcgtgccgggccaggtgagcctacctggcagtggagacggtcctccagggagccgttgggcaggaagccgtacaccaggcagtagaagccgttctgagcacagtagccagcaaagtccacaatgtttgggtgacgaaacctgtttgaaaaaggggagcactttccatcaggccagactgggtgggcagccctggctggggcctcagctcgcccgggcctgccaggcctcaggtgcccaagggagccaggtcctgtggtgtgcggtctgaagccccacgggacctggtgtggctccccctctggcctcacctggacagctgctccacctcggtcaggaagctctgcttcactgcagtccactccaggtcagcgttctgcagcccccagggtgcggtgggggaaggggcagggaagacgggcagcgtgaggctctcgaagcgaaggccttcgggccaccagtgccacctacccgaggcccagaaccaccaaggggccagggaccctacgccagaatgagggctgaaggagttgtgtggggaagcgagggggaaaggctggagaagtggtgagggttatctgatggccttccagggtccctgccagggtgcgacactcacctccttcagcctcttcacagcatacaccgtgttcctcatcaccgcccggtacacgcacccaaagccaccctccccgatcttgagctcctccgagaagttgtgggtgccccgggaaatctcacagaggggccagcaaaacggaaaggggcgggctccctgcaggagggacactgagctctctgggcctggctgtgggaagagagcctggatcaggtggggtccctgtctcttcccttctgcccaaggctccaggctctccccaccacagctgcctcccagctgacccagcttggctgactggggctctgcgctacatcaaaggctgaattccttcctccttgtctcgaatcttccctggggggcaggggacacctaccttggtagaagaaggggctggagatggcggtggaggccacagggaagcagggcttgggaccaggccgagctcaggccctgaatgggtctgggagcctggaaaagcttcataaagacaccagtgagaggcaggcagagaccagcagcagggtctacagccgtggccgtggtcaaggtgggctcttctttgggtccaccgagcctaacaaccgggccctcttacctggggagaggaaggtggaggctgaggatggcaacttccgggggctccaggcctcggcctcggcgggtgcagggatgctgctgggcctcggggcagtggtgcctggggacggaagcggggcgggagggtgccctgggacgccaaggaaggaaaggaaggttgaggcccgggtgggggagccccgtggggcccgccggcctcccagccgtggggtgcccggagtcccgcgctcacaggctgtgatgatgtcccgcgcacggagcagctgcaggtgcgtgaggatgtgcacgaggtcggccacacgggcgttgcggttgatccagggccacaggacgctggccgtgcgctgcccggagcgctcgcacagccgcagctcggtctggtcgcgcacgatcagggcggctgcggggcggggggcgtcaggcgtcggcgccaggagcccgcgcgcctcccgccccccggcagcccgccgccacccaccgaactggcaccagtcggcgggctccagggcgtccatcactttgtagaagcggcacatgacccagggcggcacctcgtacaagaagtgctgggcgccgggggctgcgggctcccccgggcccggccccccggccatggctgccgccgccgggccgggacctgccggggcctctcagggccgcggcgggcgcgggcctgggccggccgggtccgcggacactgactcacttccccttcgagccggcctcgtgcgacgcccggcggggcggaaggggcggtgcccgggcccgccgccatcttgcgcgccgcggccgcgcgctgggtcacacgggggcgccccgcgccggggagggcccgggtcccggcgggttccgcgagcggcgatcggcctcccgggctcgcccgggcggggctctggaggacgaacggcggctcccggcgttggggacagagggcagggcggaggcccgggctgctcggaaaggggccggggccgggccttccgaaagctcctgggcggccctgccggaaccctgctctccactgcggcctgcagggctgttaccaggagccctgcctgcccgccccacgtctagccccctgcacacggcagcagccttgagccattcagtctccttaggtgtcctgaaatatgccgagaacgctgcccgccacagccgtgagtgtatgcgttgctgctgccccagccctcatttggcaagggtgagctcaggcagctgtggtgaaggcttcctgagcccgccggcagagctcctgccaccccgtacctgtcccctcctgggcatcgtccttgattacttgtctggaccgccacccccggtccccgccctgagatggggaagaccccacaagcagcaacgcagacttactcttttgtttctccagctggatgtctcctccagcgacagttccccttgccctcttgatcctgacagcgaaggggttccccacccctagccctacagacttaggacttttcctagaaacgagaagtgcccaaggcccacagctggcccctgttggagtctctttcctgaagccaccaccactgtggccactcccaaggaagatgccaaccataccatgaaacccatggcttctcacgggacagactttactgagatgtaccaactcaagtatctgaaatgactgcacacccatgctaacctccacgggggcacttggtcctacttacacacaaaggcccatcagctcacggaacagggctggcatacgagatgctcaatgcatacaagttgacttttcaaccctgggatctacctttgaaggccaggccttccgagggtaccttctagcatgtgcatgtgaagctggactcctttgagcagttgtctcctccagccccttaccaacctggtgaggctgctcctgagagccaaggaagccagtaacaagggggccccctttgggcaaacccctcagcctgcccttgcctggtcagagaaccacgttagcagtcaacagagggcacgtgagggtcctggccagaatgagacacaggaggagccacagcctgcgggggtgggggtgtccaaaagcaccacagcacatccagacctagggggtgcccctaccatacgggtctggagcagggaggttgtgctgcaggctgactcatgccaggcccttcccgtcacacgctggagcagtgtgcctggagagcactggcttggaagaagctgaggggccagcgaggccagcatatggaggaggcttcccttggccgctcgtggcaggcctgaaggcagctacctgtgtccagggacagccagatc

SEQ ID NO: 315 - DNA, 813 bp, Homo sapiens
agcagcccggggcgcggtaggccgccaaagcggaagaagaagcagcggcggaaccgcaccacgttcaacagcagccaactgcaggcgctggagcgcgtgttcgagcgcacgcactaccccgacgcctttgtgcgcgaggagcttgcccggcgcgtcaacctcagcgaggcgcgcgttcaggtctggtttcagaaccgccgcgccaagttccgcaggaatgaaagggccatgctggccagccgctctgcctcgctgctcaagtcctacagccaggaggccgccatcgagcagcccgtggctccccggcccaccgccctgagtccagattatctctcctggacagcctcgtccccctacagcacagtgccaccctacagccctgggagctcaggccccgcaaccccaggggtcaacatggccaacagcatcgccagcctccgtctcaaggccaaggagttcagcctgcaccacagccaggtgcctacggtgaactgaagtccagtccccccaggacccagacgcctccctgggtggacagcaatagaaaagggggcagacgcccaggaagtgaccttctcctggatgagctctcctggcccgtctgtccagcctggactcccgagcccacgaggctgttgaggcccctgcagccgggcgcagctcttctgtccttggccaccagagactgcagcccacaacccttggaggggttgggccggaaggtggaagagcctgccaaggacctcatttagtttgtgtattaaaaccaaaaagcttttgtctttaagaaataaaaccatttttttaagcccc

SEQ ID NO: 316 - DNA, 143068 bp, Homo sapiens
aagcttcagtatgcaaattttcaatgacatgtgcctgtggattctgaaaattcacagatctgtctatccttagctgagactgaaggcatctacttcccaatgaccaaatcctggtgctgtggcgacactgagcaggaactccattagaatatcaatatcactctgcagacattccatgatgtaagctatgttttctcttgttgcaattacacttaatttaccaccagctgcttcaatgtcatgggctatcttgaaaaatgaagctcctttcgtagtcaaactggatgcaagacacagcaaatgagaagttactaaattgttggagtcctcatagctactgcctgctttaatgaacaaaccaattcttgatgcagggcatagttttccaaaggagaaatcataaaaccatttggaaatttgatgatctcaaggtcctgatgatgtggagccactcctatgggggtagctgtggctttaactttgggggcaactttgagggaataaagtctcaaaaagagggaataaagtctcaagattgttcgtgacccatagtaacttctggcttaaaggaccattcggcaagtttttaaatgtattttctataatttccatgtagttctttatattttctatttcttatttaaaacctctattttagctcgtttcctttgacactgctctggcagggaaaggggtggcactgcctcattactgccaggtaggggtagaagtccattatccacttggtctccattgatacccaaagtggggagaggctcctgttactgctggtgagggtgggagtccccccactaagtttctgctaatactgtcctggtggcttgctactattcccatgaagcctccactgatactacattacttttgggtggtggcaaatgtcctgcctctccactagccctcctgctctaaaacaacccgagtagggagtgggaaggaagctttgttactggtaggtgggagctgaagtccagacttgccacattgtcccactgatgctacagggaggaggaagcgggccacattactgcctgatagggatgaaagccccagctccctacctggccttcgctgataccagcctgctacaggagtgaagagagatttgaaggcctcaatatagcctgtcgagggtggaagtcttgctcccaatgggcctttagcagcatgggtgggtgtggggccatagctgtctctgtactgcttggctagagtggagtatttgaggtccaaaagttttctgtctttctagccctttggttagaaagagcagacttttgttggaagtatttttttgtgtttacctgttgtatttccaggttcctagcttctccagcacagtctgggatgtgtgagacacagagaaaatccagtgatgttactaccgtatggtttcttgggtcccaacgtctctagctaatctgctccaccttttggagttttcttatttgttttagatcagggatttagtcatatttaataggagaaatatggaaaaatacttctactctatcttcctggaagttcctgtttattttttatgtccttttcctctggctagaccgtaagagacttacgaaacaaacacttacacattctactaaactcaatgtccaaagtttgtgaacttcttgaatattgcttgttcatttccacccccagtcactgactgaatctccctgctgtctgtctacaatgccaatgagcttctggttaacttcttctcatgcatgcttaggcaacaacttcccagttttactacacttgcccatccctagttttgttgttgcttaatcccttggcctagtgccaccatactcctccagcagagcaaccaattcttacattataggacagcacatatccactaaaaacagttcatgccacaccaaccacatttccctttgtcaacaaaattacttgatagataattccaggaatgcctgatgaagctgattgacaacaagatatttggcagactctctgctgcctatacataccttagcatgtggaactcaagtaatgagaggtccatttaattggattgaattgggctggataggattggattgaatcctgtgggatggctaggctaaattagaaatgaagactagtttaacagcagtatccaaggatagttgactaatgagttaattttactctcaaagacagtctttagtagtaagctgtaatgcattatatcaaactattttccagtcaatgatttataagttacttgaataaggatgctaaagatgtgccttattgaaatggcaattagcacaaagttgggaatgaaatctaattagttaaataacagaatcacataaaaaaggacttgaataaatgtagcatcctaccatgttcctggatagaaagactgctatcgtaaagatattcattctcctcaggttaaattataaactcaatgcaattcaacaggattttaaaaaactagacaaagtgattccaagtttacgtggaaaataaaatgtgagggaccaaacaatatttgaaaaagaaagagaataaaatctcatccttccagataccacaatgtattataaagcaatagtaattaacatgagggcagaaatgagcaagcaagtgaacaaaataagacagatagtcacaggaaactcatatatttataggtgctttgcgtataatgaagatggtccttcaaatcagttgggaaaagatgggttattcaataaatggtgttgggtaaaattggttatacattggtgagaaataaagtgaaactcctactttgtatcatatgcaaaaaatagattccagacagatgaaatatttaaatgtaaaaaataaaattctaaaactactagaaaaaaaagaagaatatttttattcctttgaaatagaaaaggtcttactaagcaaaacacagaagtaataaatgaataaatgaagacaaatatgataaaaataagttaaaaatataagcaatctttctttgtttttttttcacctttcctagaaaaaaatatataggcaacttgttaagcaaggtagattacaagaaaatatttacaacatttgacaggccacagattattatccagcctcatctgataagaaaacttcaacataaagatatctgttttttttcttataaggttcctcaaagtgagccaatcacttcttaagctgaacaaaaaacaaaacagaagtgatcttttccaataatgaaaacaaacattgacagagcagctgtaggatcctttcaggcaaattatgaaaaggtgccctttctcagaaaccacagttaccattcagctttgtgaccagaggtttgactgtaccctagtccctactagcaacccaaccacataaccaacttcaaaggtcctgaatgactgtgttgtacttaatggcagatgatctatctcccatttttgtcctaaggattttccaagataatatatttctgcatttgttttgcttttacttcactccaaattgaaatctatttgtgggataagactaaagaaatgcttataggaaaattgatagcaccaaattcctatcttaaaaaatgaaaaaggtttcaaatcaatgacctcagcttttactttaagaaaatagaaaaagcaggataagctaaagccaaagtaaacagaagaaaggaaattataaagataagagcagaaatcaatgaatagaaaacaaaagaaaaaaatcaaaccaaacagctgattctttaagcagatctataaaattgataaaactctagccagattgatcaagtaaaaaagagagaagacacaaattaccagtattaagaatgagagaggcaatatcactacagatcctacagatataaaaagtataagggcatactttgaataattttatgactataaattaggcaacttagataaaacaaatttcttgaaagacacaaacaaccaaagctcacctaaaatactcacaaattgaatagtcttatagctattacaaaattgaggccaggcgcagtggctcaagcctttaatcccagcactttgggagggctaggaaggcggatcacgaggtcaggagtttgagaccagcctgactaacatggtgaaaccctgtctctactaaaagtacaaaaattagccaggcttggtggtgcgtgcctgtaatcccatctactcaggagactgaggcaggagaattgcttgaacctgggaggcaaagttgtggtgagccgagatcgcgccactgcacttcagcctgggcaacagaacaagactccgtctcaaaaaaaaaaaaaaaaaaaaaaattgaaattatagttaaaagtcttcccacaaagcaaactctagacccagatggcttcaatggtaaattctactggacaatcaaacaggaaacagtaataattctccacaatgtctttcataaaattgatgcggaggagatactctccaactcattctatgaaactagcattaccctgataccaaaatcatacagagacagtgtaggaaaacaacagatcagtatccttcatgaacataaatgaagtacaatgcagtcttatgcataaatcagagcttcattgttctacagataaggtaatgtaggattgttggttgcccctccaggtctgttaaattcacctccttccccagagagcatccttcttaaggacagggagcctcaatatgtcagtcctcacagcacctccctcagtcttcagcacttaccagctcatcaccacaaccgataccacattggataatttcatgaattactttagagcaaatgcaagagaaaaaatggatttttatataggagaagaaggaggaaattcttgtggatttggtacagaatagggccaagggaaaattacagatgtaaaaagaaaagtgtgtgaaatagtatccttagtgctcacaaatacaatgatttcattgtttttaaaaataaaaaatgacaaatgtctaatgcttggtggtaatgctttattgaatgtgtgttatacactggttcctcattcctgaagttagaaataataccttcctcttttcatttggttatgtttgctgaaacaaatcaaaggctgagattgaaacacatgctacttcaggtggatgaccttactactaagctcatcacaacagcacttacagctgaagaccccagagtcctacctaacttttgtcacaacccagattttggccatgtagttctgggccttaccattaaagcagacagaagtcagaggaatgactcctttccacttgaagtgagctgcaggcttctaggaaaggcaagatgcacatttccctcctgtggagcataaagcctttgtaattcaggacttaggacccatatggatttgaaatattatgacattggagctggagtggttggggacaacaccagtagtgttataggccatggaatgtcaaaagaacatggaaccctgttaaaatcattaaacatcaaaactctcccctcctctggtgatatggtttggctgtgtccccatccaaatctcatcttgaactcccatgtgttgtgggaggcacccagtgggaggtaattgaatcatgggggcaggtctttcccatgctgttttcacgatactgaataagtctcacaagatctgatggttttataaaggggagcttccctgcacaagctctcttctcttgtctgccaccatgtgagacatgcctttcaccttccgccatgattgtgaggcctccccaaccatgtggaacttttaagttcattaaacctcttccttttgtaaattgctcagtctcaaatatgtctttatcagcaacgtgaaaacagactatctgattttctgtgggatgtggattatgaccatggacagagcataactgggacagagctggaaaaaatattaattaggtgcttaaaaatatttgttagaactatcttcatgaatgagaatcaatcctgtttccatggtgattcaccaggcatcaattccaagcatccatgaatcagaaaagtcctatcttctcttagttatcatccaggactccaaggaaccataattagccaacctgttcacatttccttttcattcactagcctcgaagtttccaggggacagggactctgtcctattcatttctgtaaccttaccacctgacccagaatagctgttccctgaagatttggtggattataaatgtggatgtcttatttctttgaaagtgtgagcttcaggtactgatcacgttattccaattatcaatttagtatctttcttcaccattaaactgtgaaattcttgagggaagaacctatgactgatttatctctgtaaactcatgccaccagtattcaaaatcacacctagcacatagtaaacactcaatgtttgttgaatgactgaaggaatggatgaaaatgaacctccttgcttctgaccagtggatgagttgcttggccgtgttcctacagcctagagctcatcccctaaagcatctgaagttacccattagtgcaatggttcttgaacgctggtgttgatcagaatcatctggatgcccaggttctctgaaataagatagggtctaggcatttgtatttttaccaaggaggtgtgatggagtcagatgcaagaaggctagttgaagaaaccacatgagagtttagtgtagtgtattagaagactggtttggctctgtcgctagtggctacatcatcttgctcaagtcatgccagtctcaggacctcattcagtctcttcagctgtaatatgggtgggttgcaccacataaccagaaagatcccttccagctctacccacttacaacatggtcaaatttggtctgattttttaaatcgtagtacaatatatatgacataaaattcaccattttagccactttaaatgtacaattctgtagcattaactacattcacattgttgtgcaaccatcactaccgtctacttccagaactcttcatcttgcaaaactgaacctctgttgtcattagtcactaactattcctctccccccctccttctaggccctggcaatcaccattctactttctgtcgctatgaatttgactactctaggtaacttatataagtggaatcacagcatttgccctattatgactggtttagttgacttagcacaacctcctaaggctcaaccacattttagcatgtgtcagaattttctttgtttttaaggctgaataatattctgttgtatctgtaaataacatctttattcatttgtccatcaacagactgttgagttcctcccatcttttgactattgtgaaaaatgctgctatgaacctgagtgtacagacatctggttgagtactgctttcaattcattgtttatatggatcatatggtaattttatgtttaatttttttggaactgctacattgttttccacagtgtacatcattttacatttccatcagcaatgcacaaaggttccaatttctccacattcttaccaacattttttattttctgtttcttatttatttgtttatttattctgagacagagtctcactctgtcacctaggctggagtgcagcagggtgatctcagctcactgcaacctctgcctcccatgttcaagtgattctcctccctcagcctcccaagtaaatggaattacaggtgcccaccaccacgcccaggtaatttttgcattttttttagtagtgatgaggtttcaccatgttggtcaggctggtcttgaactcctgacctcaagtgatccacccgcctcagcctcccaaagtgctgggattacaggtatgaaccactgcacccaggccattttttgctttttagataatagtcatcctagtgggtatgaagtggtatttcattgtggttttgatttatatttccctaatgatcagtgatattgagcatctttcaagtgcttattggccattttcttctttggagaaatgtctatgcaagtcctttgctcattttttaatccagttgctttttgttattctttttgatttgaaagtgttctttatacctcttgtatactaatcccttatcagatatgatttataaatattttcttcttttccatggattgccctttttactctgttgatagtgttctttgatacaaaataatttttaatttgaatgaagcccaattaatctatttttgtttcttttgttgcctgtgcttttggtgtcctatccaagaaactgttgccaaatccaatgtcataaagctttttcccatgcttccttctaagagttttgtagttacagctcttgtatttaggtatttgactattttgagttaatttttgtacatcgtataaaataagaatccaatttttattttattttactttttgtatgtggatatccaatttccccaccaccattcattgaaaagactgtccttttcctatcgaatggtcttggcacccttgtaaaacataatttgaccatatatgtgagggtttatttctgggctctctattctattctattctattctattctattctattctattctattctattctattctattctattggtccctatgtctttctttattctagtaccaccattttgctcatcataactttgtagtaagttttgaagtcaggaatcgtaagacctccagctttgttcattttcaaggttgttttgattattcaaggtcccttgatagtccatatgaatttcaggatggatttttctatttctgcaaaaaaaaaaaaaaaaaaaaaaaaaatcattgaaatttttaaacagattgcattaaatctgtagattgttttgggtagtattgacatttaacaacattaaatcttccaatcaatgaactaggctatttttatttattttttctgtttctttgagctacttttgtagttttcagtgtataagtttttgctacctggttaggtatacttctaagtattttctactttttgatgctattgcacattgaatcgttttcttaatttggtggtagcggggattgtgcattgttagtacataaaaatgcaactcattttttgtgtgttgattttgtatcctgcagctttaacaaattcatgttagttctaacagacttattctatgaatcattagggttttctacataaaagatcatgtcacctacaaacagagataattttactccaccccttcccgttgcaatgccttttatgtctttttcttgcctaattgttctggctaagacttccactaccatgttgaatagaagtggtgaaagtagacatccttgtcttgttccaatcttagagccaaagctttcagtctttcacggcctgaaagactttgtaatatgttctcaaggttaaagaacttcagaagttttctaagcaagagaccattttattaacttagttggcagcaattctgagagattagaatgaaaagatagaggataagaagtatctggcaggtataatatattgagtgtgctgaatatacttttagttttgtataggtgttaaaaaatggcaaaggaggccgggcgtggtggctcacgcctgtaatcccagcactttgggaggccgaggcgggcagatcatgaggtcaggagatcgagaccatcctggctaaaacagtgaaaccctatctctactaaaaatacaaaaaactcgctgggcatggtggtggacacctgtagtcccagctactcgggaggctgaggcaggagaatggtgtgaacctggaaggtggagcttgcagtgagccgagatcacgccactgcactccagcctgggcgacagagagagactccgtctcaaaagaaaaaaaaaatggcaaaggaaagaatgaaaaataaagcaaggtcccagaagaggccaaaaatcttaatcaaaattgactgaacattacggaatgaaatggtttttcctttactccaattaacgacttcacaagaagattccatcctcgtttataagattaacccaaaaccagcacttaaaaccagaagccttgaaaggatggagtttggggacccttctcatgtctattcccagaagggggtcttcttctggggtcctgtcccctaaagagctaggcaaaaagtatgcttgccacatctgttgaaagatagaaagttggtctaaaaatacatgagagggaactgaaacatttcagagaaggcaagactcagaagtaagaaaccaaaagaggaaggtaaaattctagttacaaagaaaagaggaatggaaattaaattgtcttacagagaaaatccagaactgccccctcttcccttactactccatcaaaaaaggggaaaaatagtcaatgggaaagttttgagaaaaatagatctctgcattcttctggttgagaattcagacaacttgaactagagagctgggtaatttcttgactaaaggtgtgttagatctgaaagggtttttcttaaaattgtctgtgttcatccctcccatcttagagaggaacacaggataagagacctctggagctcccccagggtcaccgagctaataggatcagagacaaagctacaaagtcattttctgacatctctccagggctctttttttctggaccccccatatcaacatgatgtatttattacattggattagcaactctccttgagctttcctcagtaccaggtttacatctcagtctgtgggtctcagagaaagtacccaatcagcagcaacattacctggaaactcatcagaagtgcccctcctcagccccaccccagatctatgcaatcagaaactctggaaatgcaggccagtcctaacaagcccaccagggaattctggtgcactaaggtttgagatccactgatcaaagaaataatattccttttcttcattataatagcatgaataataactaacatgtatttcacaatttacaaaagagctttatgctcttgttaaatttgagggtagtcttctcaaaatctctgtgaggctagaaagtcagatattgaaacacctgttttatgggttcaaagataggttcaaaagagagtaaatgattgttggggtggcaggtccagagagggcaggatcaaaactgcaattgagtcttctgccttataaaccagcatagcttccccaaggcacgtcacttctcgataaaatggtgacaactagagtgtcctttcagatcattcttagaagcatggagtgctaggtcaattgtgtaattgatgaggaaataataatactaagaactcccatcttctacgtccttatatacaatcctgtcaggtagaagctgagtctcagagagaacaagttgccctcccaggaccaccaggtaagctcggcatagctgtgcttagaatgtaggctgtctggcttctgggcttgcctgcccagggaggctttgtgggttctacttggtcatccagatcacagaggggcagcactgactcctacccagtgctcttgactgtacatctaatactttctactaagaaaaccccttctctttagaccaatggttttcaaatcttggtgtgcattggaatcacctggaaagcttgttaaaacacagattgtcccaccccaagagtttctgattctgtaggctggggtggggacccatgaaagtgcatttctaataaggtcccaagtgatgctgatgccaccagtgtgtggacaaccctttgagtggtgaagctctggacaccctaatttgcaaggctaatcaggcatatgtggcaaatgaatacgaactgaaattctgactccaatatcttcactgatattcctaatccatagcatacacacagtcccattcgtttcccttttagcttttaatctacatttatcctttcttcctctgccactgccttctctccagttagctcaaaccaggtaacacataaccgcctcctaactcatccgcccagttggtttctttggctttaatctagacttcttatctccaccagatttgccttaccaaagcaccaatttcttaaggcagggttagaattaaaaatcttctgttcctcctcattgcctaaaactcctaaacttatgattcaaggtcttccatgaccttcatggaccagtctaacgttttagcctgtcctaagtgacatgcctccaccacatacttcatgctttccactttctttctccatgtctttgttcatgcatttccatttcttctacctgcgatgtcctccttcgccatctctgtagatttaaaaatcctacagggctcatctcaaatgccctttccttcatgaagcctttcatgaaatccccatcgagaggttttccctcctctcagctctccaaagcacagatgtctgcgtttgtggctattatcttacgttgttttgtattaaaatttctccagctttacacatttgtcatcctcttaaggacaaacatcttattatggtcaatgtgaagctatagaggataatttaatgaaatattccaagggctagtcattacacatgactgatttatctctgtaaactcatccacactcatccacctgattttgattggccaagttaatgaatcagagaggaaaagatggtaaaaatataataaaaatctcctaggtagtctcacatcccacagagccccaggtaatgaaatgaggccctgagataatactttatgaacaataaaactccgggttctattgacagtgaagcaagacctgagagagaaggctaaattcccttgtgtctagctgccacaatcttctgagaataatggcctttcttcccgtctgccttctgaatcataggcaaatttttctctttggtgatccctaatacagaaaggggaagtcaaataaaatatatacaaggagaaggattctgggagacagagtttcttgattcccttctgcatgctcctcctcaaaagcctttatgagcttaccttacatttaaattcttttaaacaaggcattatgtggtctggtcttttccagctccacacaccttcacactacattccccccagctaattctgctctgggaacactgaccttcttttagttctttgaacacattgatttctggtcaagatgactcagtaacttcaacctttgttgtgcccttggtgctgtgaagatatagatatatattaaccactgcacaccagaaatcagaaatagcacaacagagaataaagtcattgagccatcttctgagctccaaaagacaaattttctccaaaaagacaaattcaggctctaaaacaataccttaaggaaccagaagtggaatagaaaattaaggtggtaagcagggctaaaccacatgcctgttgagcccaggtttggaagaagacaatggcaggtaggaatgtggtttctgatgggtaataggtactgttttcatttactttctgttgcttataacagaatatctgaaactgggtgctttataaagaaaaggaatttatgtcttgcagttagggaaactgagaagtcaaaagttgagggctgcaattgacaagtgccttcttgctggtggggatactctgaagagtcttgaggtggtatcgggcataccactctcagtgaggggactgagcatactaggtcaggtctttcttcctccttttataaagctatcagtcccactcttatgataacccattaatccattaactgattagccaattaatccatgaatggattaattcattcatgagggcagagccttcctgacccaaacacctcttaaagactccacctctcaatactgccacatgggggattaaatttcagcatgagtttttgatgagacaaatattccaatgatagcagttattaaaagtacatgcttgagagaaggggattggagtcagcctcagtgcttaaactcaaaagctaggatgaggctctaacactcctgaaagaaggagttgctgctggctccttaccagggctatatcttttacagagcaggagacctaaagaggcaggaggacccggacatcgtttggaaaccaagcactaaaacaggccatctgttatacccccaatatcctctcaggacaagtgttttgaaccactcacacaaggactagtctgggcaagtgggctagatgaagaaaccacaaaatagctaagtggggagagaaagaccaaaaatactattttattcaaaatgaaaatacaatccaaaattccatgattcatgaagaaatcaaatggtatgtgttaggtggttcttgcattgctatagagaaatacctgagattgggtaatttataaagaaaagaagtttaattggctcataattctgcaggcttcacaggaagcatggtgctggcatctgctcagcttctggagaggccccaagaagatttgctcaaggcagaaggttaagggagagctggcacatcacatggtgagaaaggaagctagagagagagtgcagggtgaggtgccacaagttaccacagccagatctcttgagaactcacttactttcatgaggacagcaccaagccataaggtgtagggagccaaagtcccatgggacatgaccaactcagcattccactggaggctatatgatcaaacagcaaactgtttatcacgaatgcaggatgtgagcaaactcacaactggtcctgccaacagaaggtttgttggaggcaatcactccctggtgcctgaggtaatctactgcaacatctagagaatgcagtcttgcaagcctactctggacagggcagctggcaccttattccatcccccttctcactatctttttttgcctaataaatacagagggctgtgtaaagctcagggcccttgtccactagaggcaagttgccccctgaccccttcttccaaatatactcttttgtctcttgtcttttattctcacatttgccccctttgttcagttccactaggtccgtgcgggttatatactggtgccctgagcagcaacagaatcaggctctcaacaagtgtcatccgaacatgggactttgaggacatgaacgaagaaggtctgctggagcagaggaacagaaattgacaaggtgaacagggaccctgggacgagtctgccagcagcggatataaggtcagttacctaaagaggtactgatcagtgccctaaagagatactgggagcagtgctttaaagaagtactgggaatgggaaattttctgaatcagggtaacaaggggaagaatttgtctattaaagaaaaacattatgtgcagttgcttaaagttgtattggaacagtctggagcttaggttaatttgcagacactaactatcacatgcgtccgtgtgaagagagtccaccaacaggctttgtgtgggcaataaagctttttaatcaccttggtgcaggtgggctgagtccaaaaaaggagtcagcaaagggagatagaggtggggcagttttataggatttgggtaggtagtggaaagttacagttaaaagtggttatctcttgtgggcagaggcaggggtcacaaggtgctgggtggggaaatcatgagactctttttctgggacaggagtgtcacaaggtcaattgatcagttggggtggggcaggaacaaatcgcaatggtggaatgtcatcacttaaggcaggaactgactatttcacttcttttgtggttcttcagttgtttcgggccatctggatgtatagtgcagctcacaggggatatgatggcttaggttgggctcagagacctgacattcctatctttttatattaataagaaaaacaaaacaaaatagtggttaagtgttggggcagcaaaaattttttggggtggtatgtagagataaggggcaatgtttctcagggctgcttcaagcacgatcacggtggtgtgggaatctagagtgggagagattaagctgaagaaaaattttggggaaaggggtgatattctggggttgttagaaggagcatttgtcatatagaatgatgatggcctggatgtggttttgtatgaattgagaaactaaacggaagacacaaggtccaaataagagaaggagaaaaacaggcattaaaggattaagaattgggaggacacaggacatccaattagagagtgcccaagggggtccagtgtaattatttgcctggacaatgagttttggggctctattaggttgtcatataccaggccagattgatttaggtaaaaacaacactcttcatttaaaatatacagagtcctccttttttagcagtgagtaagttgagacctattcctgtcttcttatattaataagtaaaataaagcaaaatagaggtgaagtgttggtgtcatgaggggaacaggaagcagttcggtcctatttgcaaattgattttgggggggtaaagaaaactagtgtacctttgcctgtccaattaataagtagacacatgtagatggaggagccacagaggaagaagagaactttgtaaggcaaaactggaaatgtaaagggaaaagatgagagggagcaccaaaagaggtgtcttgcacccagactcagggatctagtgagagcagcagctgttagaggttgtaatggggattaatggggctactgggtagagggggaggttcaacttttatggtgtatgagaaagcgcatagtgtctacaagcaacctttcattgctattcataggattgggtataagtaaacaagaagggggggctaggaggagagtctgaagaacaaggggaaggtagccaaggatggagtgaaatgtagggcaaatgtcttaaaggaaatgagaggttctaagaggagggctagtggcttgtaacccacatggaagaggttacgaaaggatgatagaatggaatgagcctgtgaggctggaaggaggaattttccttggtccaagaaccatttgccttgtgtgggaagagtttgataggtggaagtttcagtgggagggtaggcgggagtgactgatgagaaggagaaaaactggccataagggacagaagttggaatgctagctgctcctttagctaccttatcagcataagctttgccctgagtgatgggatctgatgccttttgatggcgcttgcagtgaatgaccctagcttccttggaagtagagcagctttaagaagagtttttatgaagaaggcattaataatggaggaccctcgtatagtgaggaaacctctttcaggccatataacagaatggaggtggagaatatggaaggcatatttagagtcagtataaatactgacacacaatccttttgcaagagtgagggctcgagttaaggcaatgagttcggcttgctgagagggagtggagtggggcagagtggtagcctcaatgatagatgtgaaagatactatagcgtagcctgcctttgctggtgagtggtgattaggcctagtggaactgccatcaataaaccaagtgtgatcagagtgaggaacaggaaagaaggaaatatgggaaaatggagtgaatgctaggtggatcagagagatacagtcatggggatcaggtgtggtatcaggaataatgtgggaggccagattgaagtccaggccaggaacaatggtaattgtgggagactcaacaaagagtgagttcaactgaaggagccgggggagggggagagcggcagaaagtatatgcatcaggtgtgaggaagaaaatacattttgaaagttatgagaactgtagagagtgagttgatcatagtttgtgattttgagggcctttaaaagtattaaagcagtggcagctgccacacacagacatgagagccagcctaaaacagtaaggtcaatctgtttagacagaaaggctgcagggcactgtccaagctcttgtgtaaggattctgaccgcacagccttgtactttggctgtgtgtaatgaaaagggttgggatgagttagggagagctagtgtgggagtagcttctagggctgtttttaaggaacataaagaggagtggggaaaggatttaggatctatggggtcagctaggtttccttttgtgagtttatgtaatggtttagtcaggatggcaaaaccaggtatccaaaggtgaaagtacccaaccatgtctaggaaggaaaggatttgttgctttgtagaagggattggggtttgggagattagccggacacagatcaggagggagagcacttgtatttttatgaagaattatgccgataggtaacggatgaggaagaaatttgggctttggagggggatacacgatattcccttgagaatagatgttggaggagcaggagggtgtcctgttgggaagattcataggaggggctataaagtagaaggccatcaaaatattgaataaggtgacaagcagatggacagaaaagtaaattatgagaaagggcttgactgaagtaatggaggctgtccctgaagccttgtggcagtacagcccaggtaagttgctgagactgatgggtgtcagggtcagtccaagtgtaagtgaagagaggctggggtgaagagtgcaaaggaatagtaaagaaagcatcttcaagatccagaacagaataatgggttgtggagggaggtattgaggataggagagtatatgggtttggcaccacagagtggataggcaagacaatttggttgataagctgaagatcctggacaggctttagtcccttcaaagcctgttgtgggatgggatactggcattgagcaggataagggtaattaggttttaatgggatggtagggttgcgtgatcggtcaccaaggagggagtagaggtatcccatacttgtgggttaagatagggagtcaggaggggaggttgtgaaggaggctttgaactggggaaaagggtggcaatgaggtgtggctgtagcccaggaatagtcagggaagcagataatttagttaaaatgtctcaatttaataagggagctgggcaggtgggaataactaaaaaggagtgcataaaagaatgttgtccaagttggcaccagagttggggagttttaagaggtttagcagcctgaccatcaataaccacaacagttatggaggcaagggaaacaggcccttgaaaggaaagtaatatggagtgggtagcctccatattgattaagaaagggacagacttaccctccactgtaagagttacccaaagtgtctgtgatgatccaggaggcttctgaggtgatcaggcagtgtcagtcttcagctgctaagctgagaagatctgggaaggagtcagtcagagagccctgggccagagttccaggggctctgggagtggctgacgggcaagttggacagtccgatttccaatgcggtcccacacagatgggatacagtttaggaggaatcctgggctgtaggcattccttggcccagtggccagatttctagcacttgaagcaagatcctggaggaatgcctgaccacagtggtttaggtgttttgaagttcttgtgtgctggagatgtggctgaggtttttctcacagcagaggcaagtaattgcaactcagaaatacattgccacttggctgtctcttctctattattgtacaccttgaaggtgaggttaattaagtcctgttgtggggtttgagggccataatctaatttttgaagcttttttaatgttgggagtggattgggtaataaaatgcatattgagagtaagacagccttctggcccctctgaacctagggcagtaaaatgtctaagagttgttgccaaagggaccatggactgggctgcgttttcatatttgatgaaaaaaaaagagcctaaatgctaactaatttgggagaggtcagataaagtaaaaggaacattaatcttgactatgccttcagctcttgccacctctctaagaggaaattgttgggcaagtggaggagtgctagtcgtggaatgaaaccataagctggactgggtgtgaggaggggaggtgatagaaggattacagcgtaggggagtagaggctgaggaagaattgggacctggctcagcctggtgaggagtggcctggtgaggagcagcctggggaggaggagagaggttagatgggttcgtagaaaagaaggattcaaaggactcggagcttggtgaggagactgaaggaacagacaggagagaaagaagaaagatttgggacaagtcgcattgggagcagagactaggaagggagtgatgtgtaaagaatgcctggacatcaggcacctcagaccatttgcccattttatgacaaaaattatctaagtcttgtagggtggagaaatcaaaagtgccattttctggccatttggaacaattatcgagtttgtattggggccaaatggtgttgcagaagaaaataagatgcttaggttttaggtcaggtgagagttgaagaggttttaggttttttagaacacaggctaaggcagaagaaggaggaatggagggtggaaggctgcccataataaaaaggtaagtttagagaaaagagaggatagagacacagagagagggggtggtggtactcatcagccaggggaggtggtacttgccaccaaggtgatggatcaaggcagtcatccccacggtgatcagacacctctgaaatgtgggtgaataatcaggcaggtgtccctgcagtgattagacaccaaggggagactgtcttcccgagtccgtgaccggtgctggagttttgagttcacagataaaacacatctcctctgtctctaccagaaagggaaaggaactgaaattaaggaagggagagattgaagggtggagagatagcaagagagttggaaaagagaataaaaagaggccacttactcaatttaaaattggtgagatgttccttgggctgatctgaggacccaaggttgtaggtggatctcctcacggaatgagggtgaggacaggggactggtctccagaaggagttcccgagtcctggatcttcagcaccaaatgtcatgtgcatccatgtgaagagagtccaccaacaggctttgtgttatcaataaagctttttaatcaccttggtgcaggtgggctgagtctgaaaaaggagtcagcaaagagagataggggtgggtcagttttataagatttgggtaggtagtggaaagttacagttagaggtggttatctcttgagggcagaggtgggggtcacaaggtgctgggtggggaaatcctgagacttatcatccagggaaggagtgtcacaaggtcgattgatcagttggggtggggcaggaacaaatcgcatggtggaatgtcatcagttaaggcaggaactcactatttcacttcttttgtggttcttcagtttcttcaggccatctggatgtacacgtgaaggttacggggatatatgatggcttagcttgggctcagaggcctgacactaacctcctgcagaagccacaaaaggttattacacataaaccatggtttccacaggcaggcactcttgatgtggaaaattgggatagagcaggattaaaacaagctcatcaaaaaggtcttaaagttgattcttcagttttctccacttggagtttagttcatactgtacttctgccattatctccttattattctgcggaacagcaggctgaatctaaaaattggaaagaatttgttgtcctactcacagctccaattgaatataaaaaacaggagagggaggataaaaattggcctataccgcctcctccagatgcagaaacatctgtaccatctccttcagtggcagaaatagagatcccagtacaaagaattttatgctctgctgtcatagctggagagcccttaggaccttgtgcttttcctatttctgtaaggcctgatccaaataatccacagcagtttattcatgaacactctccactagaatttaagttgttgaaggaattaaaaactagtgtggtcaataatggagtacaaagccaatggttcctggaggaaggaatgctagacatagaactttgggagcaagtggggagaaatcttaaacaacaccaggcacaaaggcatcaggtcccagtaaaatcttttatgttaggggctttgagtagagcagccctggttgttacacacaaaagagcctaaaaagggaaaggaggaggaaatgtcacctgccttatcacctccccttccctcagtgccaatatcactgggccaaaataacaaagaggaaatggaggtcttacctaagcttcctcctccaatagataggaagaaggacagaggatacgctacagctatcagtccctgtcttaagcaggcagcattagaaggagagctcttagccgggtgcagtggctcatgcctataatcccagcactttgggaggccgaggcaggcagatcatgaggtcaggagatccagaccatcctagctaacatggtgaaaccccgtctccactaaaaatacaaaaaattagccaggcatgttggtgggcacctgtagccccagctacttgggaggctgaggcaggagaatggcatgaacccaggaggtggagcttggagctttcagtgacctgagattgcaccactgcactacagcctgggcaacagagcaagactccatctaaaaaaagaagaagaaggagagctcttaacctgctcagtaatgcaaaatcggcaaggcaatcaggtgtatgtttataaaaagataagaaaaaggcattagaagccaaaaccacgtggccaagcaggcagtgggcaggagaaaatgctcagaggcagaaaagctcacagcgacaaagccaacaaggtctgcccaggacggcagcatccctctggcaaaggagcaagggagcagcacagacacaggcaaagcctaaacaagtacaatgtggccacctcccaggacctgcaccactgccctctggctctgtgggcagcccattgcaaaatttcatgtgttacatctcaggctatgattctctgctaagatgtaagtaaaatgtaagaatttgaaaagcatcttttctaataatggccactattgtcatctctctcctatccctgatgtagctttccaaattcaatttaagtaaaacagtaacctttgaagggaaagagattacagagggcccatgaattagttgaagagtaattaaaagctaggcatgtaaaaccacacattacgctttaaagaagaaatttaaacctaattaaatgatatttgttaaattagaaggtaaaaatgttgtgccctgttgggaacaggcccccaaatctggccataaactggccccaaaacaggccataaacaaaatctctgcagcaccatgacatgtttgtgatggccatgatgcccaccttgaaggttgttggtttactggaatgagggcaaggaacacctggcccacccagggcagaaaattccttaaaggcattcccaaaccactaatgatagcatgagcaatctgtgccttaaggacatgttcctgctgcagacagctagccagagcccatccctttgttttggcccatccctttgtttcccataaggaatgctttcagttaatctatgatctatagaaacgatgcttatcactggcttgctgtcaataaatatgggagtaaaactctgttcagggctttcagctcagaaagccataagccccctgatttcccacttcccaccctttatttctgtgtgtgtgtcttgaattcctctagcgcctctgggttatggtctccacaaccacgctggtcttggcagtgcccttctcagaaagtgaaaaagagttgtatgtaagtgtagtgaaaacataagcatgaatcactgtcttaacccactgattagatagtctttgatttgtacttgctaaaagagtcctaaattgagttcctcagctagtgagtcactgttttcaagactgtttgccagattgaagtccataaacttggtcagcccgaaaactcaattacaagatctaagctattctgcctgtggctttaagcacatggttaaagtatattatttaagtctctccttctagatatgctttcagattttctttttaaacttcttgttacttatttcagctttccatattgataattaatgcagtcaattgctcagttatgactgtgatatcatcaggattcctttaagtaaaaggcaattcaaagcggtattgcactcccccatacctaatgctttaacactgtttactgatgggtctggtaaacatggaaaagctgcagtctagtagagaccacataattcaatcactcgatctgagttcactagcactcagagagctaaggttactctgtttatttattaaagaatttttacaaccttaagctcactctggactttccagccttatgtggcaaatgtagccatcaatttatggggtcaagacttacttacagcatgggatatgaggcttacaaatgagactttgataacccaggattttaaatgttgaagaacacgggatatcagagtgaaaaaggtttagggaaaattctgacaagggaaaattctaacctgatatcaataactggaaagacaggttaaaccctgcaaggggatacattgacattttttcttcctcacttgctcttttctgctgtctgaatatgggcatgagggcaagagtcattttagaccaccaagtgaccttgaggatagaagccttatactagaggtggtgggaaagaaaaaacagaaggactcataaagaaaaaaataataaacctcagtattaagatggaaaaattcccccaattggtctataggttgaacttcatctctattaaatttcagctatgtttttgcagaatttgatatgctgatcataaaatttatatgaaaatgcaagagacacagaatagtcaaaactttgaaaagaagaaagttggaggacttacacttgttgattttaaggctttttacaaagctataataatcaagacaatgtgttactgacataatgatagacatattgatcaatatagacaatggatgaatggagtagaattgacagtctagaaataaaaccttatatatatggtcaatttatttctttatgtattctgtcatccagaatacataaagaacaccttcaactcaataacaacaataccaacaagggtgccaagaccaatcaatggaggaaataatagtcttttcaagaaattttgctgagacaactaagtatttatatgcaaaataatgagtttgaatggctaccatatacaaaaattaactcaaatggactatattaggtcagtgcaacagtaattgcagtttaccaccattacttgttttttttttttggtttttttttttgagacagagtcttgctctgtcacccagaccagagtgcagtggcatgatctcagctcactgcaagctccacttcctgagttcacgccattctccttcctcagcctcctgagtagctgggactacaggcatctgggtaatttttttgtatttttagtggagatggagtttcaccatgttagccaggatggtctcaatctcttgacctcgtgatctgcccacctcagcctcccaaagtgctgggattacaggcatgagccaccacgcctggcctaccattacttttaatggcaaaaatgcagttacttttgcaccaccctaatagaactaaatgtaagagctaaaactacaaaactgttagaagaaagcataggagcaaatcttaatgacatgagagttggcaattgttttttagatatgacaccaaaagcatcaaggacaaaagaaaaaaatggataaattggacttcctccaaattaagagaacttttgtcctgcaagcaatactattaagaaagtgaaaagacaagtcacaaaatgggagaacatttttgcacataatatatttaataataggctgacatccagaatacataaatacctacaactcaataccaaaaagacagcccaatttaaaaatgggccaaggatatgaataaacatttctctaaagaagatacaaaaatggtcaatatgcacatgaaaagatgctcaatatcaatatctattaggaaaatacaaattaaaacacaaaatataaaacacaagatatcaatttacactcaccaggatggctgttatcaaaaagacagataacaagtattggcaaggatttggggaaattgtaaccttcatacattgctggtaggaatataaaatttgcagcaggtttggaaaacagtttagcagtttctcaaaaagcctgggcatggtggctcatgcctacaatcccagtgctttagggagctgaggtgagaggattgcttgagcccaggagttggagaccagcctgagtaacacagtgagacctcttttctaccaaaaagaagagagttaaacatagggtaccatataagccagcaatccatctcctagatatgtacccaagaaagttgaaaacatatactgacacaaaaacttacatatgaatcttcatattagccttataataatagccaaaaagtagaaacaacccaaatacccatcaactaattaaaatatggtgtatctatacatattatttggccataaaaggaagtactgatacatgtcataacacaaatgaaccttggaagcactatgatctctgtattagtcagctcttgtattgctataaagaactacctgagactgggtaacttataaagaaaaaggcttaattgagtcacagttccacaggctgcacagggatcatggcccaggagacctcaggaaacacagttatgatggaaggaagagagtgaaggaggaggtgctacatacttttaaaccaccagatcttgtgagaagtcactcactatcatgagaacagcaagggagaagtccacccccatgatccagtcagccccagccaggccccaactccaatattggggattacaattccacatgagatttgggtggggacactaatccaaacaatatcattctgccccagcccctcccaaatcctgtgtccttctcacattggaagatacaatcatcccttctcaacagtttcatttcagtattaactcaaaaatccaaagtctcatctgagacaagacaagtcccttccacctatgagcctataagatcaaaaagaagttagttacttccaagatacaatggaggtacaggcattgggcaaatatatccattccaaaagggaaaaattagccaaaacaaaggggccacaggccccacgcaagtccaaaatcaagcagggaaatcattaaatcttaaagcttcaaaatgatatcctttgactccatgtctcacatccaggccacaccaatgcaaggagtgtgctcccaaggccttgggcagctctaccctgttgctctacagggtatagcccccatggctgctttcacaggctggcattgagtgcctccagcttttccaggtacacagtgcaagctgttagtggatctaccattctagggtctggaagattgtggccctcttctcatagctccagtagacagtgccccagtggggaatctgtatgggggctgcaaccccacatttctcctctgcactgcccaatagaggttctccatgagggctccattcctgtagcatacttctacctggacatccaggtgttttcatacatcctctaaaatctaggtaggggctcccaagccttaactcttgccctctgcacatccgcaggcttaataccacatggaaaccaccaatgcttatggcttgcaccctatgaagcagtagtctgagacatatctgggcccttttggccatggctgggatgcagggaacagtgtcctgaagtggcacagggcagcggggccatgggcctggcccatgaaaccttctttcctcctaggcctccagacctgtgatgggagggtctgcctcgacggtctctagaatgtgtttgaggcatattcctcattgtcttggctattaatatttggctcctctttacttatgcaaatttctacagcctgattaattcctttccaaaaaaatggggttttcttttctactacatggtcaggtcacaaattttccaaacttttacgcttccctttgaaatgtaagttccagttgcaggtcatttctttgatcacaaatataagcatatatttgtagaatcagccaggccacatcttgaatgttttgctgcttagaaactgcttccaccagataccctaaatcattgctatcaggttcaaaattctacatatctctagggcaagggcacaatgcctccaagacctttgctaatgcataagaaaattgacctttgctccagttcccaataagttccccatcttcatctgaggtctccttagcctggacttcattgtccatatcagtatcagcattttcatcacaataatttaactagtctctaagaagttccaaactttcccttatcttcctatcttcttctgagccctccaaactgctccaacctctgcccattacccgggttccaaagctgcttccacattttcggtatctttatagcaatgctccattcctgataccaattttctgtattagtctcttctcgcactcctgtaaagaactacctgagactgggtaatttataaagaaaagaggtttaattgactcacagttccacaagctgtataggaagcatggttcagaaggccacaggaaacttacaatcatggaggaaggcgaagagaaagaaggcacgtcttacgtggctggagtaggaggaagagagtgaagggggaggtgttacacacttttaaacaaccagatcttgtgagaactcactcactatcatgagaacagcaagggagaggtctgcctccatgatccaatcacctcctaccaggctcctcctccaacattggggattatgatttgacatgagatttgggtagggacacaactccaaaccatatcaatcccatttatatgaaatgtccacaatagataaatctatagagacataaaatagattggtgcttgcctagtgctggacgtgacaggagggtgtgagtaaaagaggcaatggagtgataggtacagggtttctttttggggtgatgaaaatattataaaattagattgtggttatagttgtataactcttgaatatcctaaaaatatattgaattttccatttccattttaaatgggtgaatcttatggtatgtgaattatatctcaataaaactgcaaaaaatgcacaatttgcaattgcaaaaatatggaaccagtccaaatgcccatcaatgagtggataaaggaactgtggtatatatatatatatatatatatatatatatatatatatatatatatatatatatacacacacacacacaccatggaatactactcagccataaaagggaataaaacaatggcattctcagcaacctggatggaattggagaccattattctaagtgaaataactcagtaatggaaaaccgaatatcatacattctcactcataagtgggagctaagctatgaggatgcaaaggcataagaatgatataatggactttgggaactcagggaaagggtgagagaggggtgaggaataaaaggctacccattgggtacagtgtacactgttcaagtgatggctgcaccaaaatctcagaaatcaccactaaagaacttatttacataaccaaataccacctgtttctcaaaaacctattgaaattaattaatttttaaaaactgctgaaatcaatagtgaaaggatggactattcaataatgacacagttaattgaatatcatattttaaaaattagatccttacctcacactataacataacaataaattccaggtgaattatagaccaaatatgaaaagcaaaattttaatattttagaagacaatttttatgaccttaagttagaaaatgatttttaaaaacaggatgcaaaaacactaatcataaagagatattttaggccaagcatggtggctcacacctgtaatcctagtactttgggaagctgaggcaggtggatcacttgaggtcaggagttcaagacaagcctggccaatagggtgaaacatgtctctactaaaaatacaaaaattagctggaaatcgctcgaacccaggaggcagaggttgcagtgagctgagattgtgccactgcactccagcctgggtgacagagagagactccacctcaaaaaaataaataaataaaaataaagagagattttaataaggtgcattaaaataaaaaactatccatcaaagacaccatgaataaagttaaaataggccacaatgagaatatatttgccatgaattttttctttttttttgagatggagtcttgctctgtcacccaggctggagtgcagtggtgcaatctcggcttactgcaaacttcacctcccaggttcaagcaattctcctgcctcagcctcctgagtagctgggattacaggtgtgtgccaccatgcctggctaatttttgtattttttgtagacacggggtttcaccatgttggtcaggctgagctcaaacccctgacctcgtgatccaccttcctcagcctcccaaagtgctgggattacaggcatgagccaccgtgcctggcctaccatgaatatttttttaaaggtagcatccagaattaataatcttctccaacaaatttcattagtagtcagggaactgcaaattaaaatcaaagtaaaatactactttccactcattagactaaaatccattcaagtctgataatacctagtactgagttggagtaatagaaactgctaatgggacagttagttggtcatcactttggagagaaattagtcagtatctagtaaaagttagtgatacaccttccattttcatctgttctgtgctgctaccaaagaatacctgagactaggtaatttataaataatagaaatgtatttctaatggttctagaggctgagaagtccaagattgaagggccagcctctgcagagagccttcttgctgtgtcatgccatggcagaagggcaaagagagggcaagagagagcaaaagcaaattcacagcatcaatcccttttataatcagcattactctattaatgagggcaagaccctcatggcctaatcacctctaaaaggtcacacctcttaatactattgcaatggtaattaagtttctaatacatactttttgggagacattttcaaactatagcacctaccctatagcccaacatttctactcctaggagtatgccctagagaaattctgcataaatatctaaagagaggccattgttgcattgttaggtactggaaaattggaatcaattactatgtctaccagcagcagaagatggctttttaaaagttttggtttattcatgaaatggaatattgcataaagtatgctccatctcaccagatgaaaacatttttcactaggactatttcaaaagtagtcttatcactgggcttctctattatgcataaaaattttaagtgaacatgttctttgacctagtactcctacttttaggaatttgcccaaaagggacaattatactactgggataaatctttgaatcataaagtaagttgtaaatggtacaagcagtatgtcttatttttatttaaagcacattaacaatattacacatatagtaaaaaataaataaataaaacatgtgaataataaacacccaatttagaacaagtgttgacagtggagagggaaagagagagaaagaaggagaaatggggagtgggagcgggtacacaaggaaattttagttgcagctccaaatttttactttttacacaatgaagcgaatatggcaaaataagatttgttaaagttgggcagcaggtacacagatattctatcattatcctttgaatatttctgtagatttaagttgtccattaaaaaaataaaatacacacataatttttaagattagttttttctatttcctggccttcgcatgcactgttaactttacctggaattctttatgcagtaattaagagcaaaggtgtagagcaagactgcttgagcttggatcccagcactgagttgatttagggagaataacttaatctcttaatcccaagagaaaatatgatataatagttttgagctcataaagttttcataagcattaaatgtgacctatatatgtaaagcaatctaacagtgcctatagtatttataagtgtctgcattaccaaattcatcattatcatggcatgtcatgtcaccatccactacattaccatcactgtcaccatcatcatcatcaccaccaccatcatcattaactccctttgtctagtcaattcatatttgttcttcgtattttagatacctgttaaaatattttttcaaagatgtctactctgattcttcagtacaaatttgatttaataagatcctatcattttgtccaaatacttataaaaatttgtagttctatatttaatgtgttttgtttgtttaacatctctctcctacattgtgttaagttttttaaagagaaggtaagggttaaagagagacatagagagagaaagagagacagagagagagagagagcggttctacagcaatacaggtatattagaaaaacctgcaaaggtggggaccagcttaatgccagagccccccactgcttataggctggggtacttataggtctgggggtacttataggcctgggtgggtggggtctgagcagtatggcttgctgcccaagaagatgttgataagacgttcccatgatgaggcagtttggtccttgcttccatagagtgtgatgcttcttgcactttttcccagcagaatgtggtagggatgttccttcaggtgggcctttgcctggcagggtatgataaggatgttcctgtgccttggaatcaggtagttagacaggatgtttctcacagcctgaacccccatggaatgtttcactttgaccagggtctgcgaaatagcagggggcttacaaaatggtgtagtttggactaacaccttggaacacaaaagtttcttggggccaaggctggcgtattagtctgttttcatgctgctagtaaagacatacctgagactgggtaatttataaagagaaaagaggtttaatggactcacaattccacatggctggaggcctcacaatcatgagggaggcaaaggaggagcaaaggcacgtcttacatggtggtaggcaagagaacgtgtgcaggggaactgccctttataaaaccatcagatcttgtgatacttattcactatcaaaagaacagcacgggaaaaatctgcctccatgattcaattacctcccaccagattcctcccatgacatgtggtaattatgggaactacaattcaagatgaaatttgggtggggacacagtcaaaccatatcagctgggtatgttttattcacctttttatacccattgtcatgtcttctggacaaacaatggatgtaaaatggtatagactcctgagtactcatttgttgaatgacaaatctatgaaccatttgaccagtatgcagcagccattaaaattatgtttatgaataatttacagcatggaaaaatttggggttgctagtagaaaaacaaaaaggtacaaaaggatatatataataagcctacaatgccatataaacaatactaacagcaaaaacaaacctataaattgggggaagatggggcagatagaagtaacctaaaatactaacatgttgttttggggtcatgaaattataaatgattatgcaccccttaatttttactttctatgtttgatttttctatggtaaatgcatttttattgaggtggaattcacataacatgaaatgaaaaatttagtggcatttattatattcacaatattgtacaaccactagctctacttccaaaacattttcatcactccaaaataaaaccttgtacccattaagcagttactccccattatttcctctcttagctcctagcaaccaccaacctgctttctgtctctagggatttatttattctggatattccataaaaatggaggcacaatatgtaccttttatgtctggcttctttcaccaagcatgtttttgaggctaatccacattgcagcatgtatcagtacttcatttctttttatgaataactgtatacagaccacaatttgttatccattttttggtttatggacatttgggttgtttccatctctcaactattgtgaatagtgctgctatgtatatttgtgtacaagaatttggttacctattttcaattcttttatgtatatatctaagatgaaattgcagggttatatgctaatcctatgtttagcatttttttttaggaaccattaaactgttttccaaatctgatgccccattttatattcctactagcaatgtaagcaagttccaatttctccatatcctcaacaacacttgttattttctatttttgttatagccattctaatgagtgtaaagtgatatatcattgtggttttctttgcattttccttatgaacattgatgttgagtaccttttcatgtactttttggtcatttatatatcatctttggagaaatgcctcttcgtgtatgttttgcccattttaaaactagattgtctttgttgttgacatgcatgcattctttaaatattctgcatactaggcccttatcagatatatgatttgcaaatgttttttctcattttactggctgtcttttcactttattgataatgtcctttgatgcccaaaagttgtttattttgatgaagcatatttatcaatttatttcttttattgctcatgcttttgatgtcacctctaagaatttataaccaaatcagaggtaatgaaggtttacccctctattttcttctaagagttttatagttttgactcatttacttaggtcgctgattcatttttagttaatttttgcatatgatgtgaggaagaggtccaactttactcatttgcatgtggatattcagctgtgccagcaccatttgtgaagagtctatcatctcctcatttaataatagtattgacacctttgttgaaagtcaattgataataaatgtatgagtttatttctggaatctaaattctattccattgatctacatgtctatccttgtatcagtatcacactatcttgattactgtagatttgtagtaagttttgaaactagaaagtgtgagtactgcaatattcttctttttcttttttaaagattgtcagggcctcttgcaatttaatagggatatgaggattgacttttctattctacaaaattaaaattttgttagagattgcattgacactgtaggtagctttcagtaacattgccatctcaacaattttaagtattctaatacatgaatatgagctttctttctctttatttaggtcttctttaatttctttcagcagtgttttgtagttttggggtacaagtctttcacctttaaattttggtgaaatttattcctaggtattgcatttttttatgctattgtaaataaaattattttctcaatttcctgttggatgttcattgcaggtgtatagaaactcaactgattctttgtgttgatcttatgctgagaccagctcagttggggagaccctaacctagaagcactagaggaattaaagacacaaacacagaaatatagaggtgtaaagtgggaaatcaggcgtctcacagccttcagagctgagagcttcaaacagagatttacccacatatttattaacagcaagccagtcattagcattgtttctatagatattagattaactaaaagtatcccttatgggaaacgaagggaagggctgaaataaagggatgggttgggctagttatctgcagcaggagcatgtccttaagtcatagatcactcatgctattgtttgtggtttaagaatgcctttaagcggttttctgccctgtgtgggacaggtgttccttgccctcattccggtaagcccacaaccttccagcgtgggcattatggccatcatgaacatgtcacggtgctgcagcggtttttatggccagttttggggccagtttatggccagattttggggggcctgttcccaacaatcttataccttgcaattttgctgaatttgcttgttaactttgatagtttttttgaggattatttgggattttctacatatcatgtcatctgtgaataaagatagttttgcttctttctttctcatttggatgccttttatttccttttcttgcctaatttccctggctagaacttccagtatgatgttgaataaccatggtgaaatgggcattcttgtctttttcctgatgttagagagaaatttttcagtctttaaccattgagtataatgttagctgtgggttttttacaaatatcttttatcatgttgaggaagttccttcctactcctacttcttggagtgtttttgatataaagggtatttaatttgtcaaatgctttttctgtgtcagttgagattatcatgtgagattttttttccttcattctattagtgttgatgttacattggttgattttttatgttgtactacatttgcattctttatataaatttcacttggtcatggtgtataacccttttaatatgccattggatttagtttgctagtattttgtttagagtttttgcatctatattcataagcaatatcagtccacaggttttttgtggtttatttgtctggctttgctataatggtaatgctgtcttcttagaatgaatgagggagtgttttctcctctttcattttttaaacgtttgagaaggagtgatattaatttttctttaaatgtttggtagaacttaccagtgaagccgtctggttcttaacatttttctgtgttgggaggtttctgattaccaatttgatctctttaatttttacagatcttttcagattttctatttcttcttgagtaactttttagcaatttatgtattttagaaatttgttcatttaatctaggttatttaatttattggtgtgcattttttcatagtattatcttataatcttttaatttttgtaaagttgataatgtccccaccttacctgatcttagttatttgtgtcttctctgtattctttttgtcttcttcttctgtcttagcatagctaaaggtttgtcaactttgttgatcttttaaagagtcaacttttgctttcagcatgcattactttttaaatagaaatatatacacctaagttgcattacaaaggagttgtcctccacacacttattctttcccaccatcagaggtttatggtccccgcaaaagtcaccatcagttgggctcaactccaatcagtcatggtaggtcagggtccatctcattgtctccatcactcatgcccacccagggtaagtctaatcatgttcaccaatcagaacctctgccacatcagctctgtgggtttcctctcatgccatctgtaccaacaatgagcacagtctgggtttcctgatgttttctatagcatggtgcccctccctgggacacctcagaagccacaatgatattcattaaacttcttcctgcaagtactccctctattgctccttctactcaccaagcttagtgtcagggaatatgctggtggggagtatgaatcttagcttctcactcccagactcggctcccaacctgctgttgccaagtcttggggacatctataaatgccttctaaatacctgtcttggcctatccccagccacagattcctccctagagcaggctacctctgaggcatctatactgagatcttaatcacagagacatttaaaacatctaggctacaaaagaattcctactatagggttcaaatgaatttctttccgtcacttgagacagctttttagcaagtacatgtattaaagattctgatttccccttttttctcctacagtttgtttggcctaaaggtatgacatctaatctgctgcatttacactctaagtcaaaattaccattttgttcttttaatttctatttctaatcatacattcttgtctactcctggttcatctggagacaaagttgaacttagaagatggaggagaaattcttatctgccctctgctagttgacacttcctttccaagaatcatttgcagttgctgggctttcttgctgtgactctatgccctgttgtgttactttttcatttgtgacaaaaacagtggtaatagtttgcttcatttttattatgaagacttgaccaggataggtaggaacataattactgctttttctgtgggcatcatattggtccagatcatgtttaaccagaattgaagatgtaaaatcctagaactcactaatctattttagtaggtcacaggaagcatgcaaaccataaaaaccgcaatgaaccaaaagcatctgtgttgacaagaggcaagaatttctctattttctaaaggcactaactgaacaaatctattgcccattacttaggaaattgctaagggcatcgttaaagtacttcaggctgttgaaaaaccttttctgtcttcttgccccaccaccaattctctctagctatgctttctctcacatgttcttgccatccatggagtggcagagaggttctgagtacaactctaactttcagtttcaatggcctaatccccaactcaactgctgaccttgagtgtaaaaataaacaagatcttaaacatcttagggccagcattctgggtcttcttttgttatttggggagcataaactattctcatatcattggcttgcagaaaaattgagcttctcctcttccttgccccatgtcaccttgaggtgaccacagccctgccttctatgtaatcctgcttggtcagcaggcacatcagagctcagtggcttgtgacatactttccttcaagcctgctcgaagggccatactcatcattgagactgggaaccttagaaaccatgaacccagtgccaatgggtagatacagaattctcaaactcatgaaaaaacatcctttttaactctctccgtgtgcataaagaattctaagatgtactgatcaagattcccaattttctaactatctattaatatatggacgaggtaagaagaaagttgcaagaaaaaaatttgtttgacttgacggttgtgtggttatttgccacactcccccagatccactctgagtcccaggatgctgattttaggggctacattgcctagactgtccattattccctcttcccatctggttcagtcactgggaagcactggtaggaggtcagagtgggagaaggaggttaggatactttctgcccctgctgtcctactgctttgctgaacttctagcagtggctgagccatcaacctgcagctctcaattccagctgtctgtagcactcaagtggtattgtttattcttttgatccttctagctgttaaggaagaaaaaaataattttttcctcaatgctcataagttcttggaatggacccctgtaacaaaagacagattaacacgagaaaagtttattaacgtacatattttatacgtacataggagctatccagggaatgaataattcttaaaaaggtgactttgaattccagctcatatagcatcttcaacaaagttcagtaacattttagagatatgacaagacaaagaaaatgaactttgagcctctagggacagtgacttgtaggaaggcaaaaggaataaatggaggtaaaggctggttagtaatacttgttaatgaagattcctctggtgccatctccaggtccacaaggatttaaatttgtcttcagtggtgaacctttgttcaccctggcagaaggtgtggaggggggtgcagatccgttttgtctttgtaagtctatatcctgcttttagacaaataaagggagggaaaagagctttccttcatctgcttcttaattgccttcagctcaacaatccttatgcaaaagaggtacattttagggtgtcaaattctggtctcccacaaagcatagggatgacagaccacctcaccatccctgttgcttcttttaagcctgctcacccctccaaaaatattttcattctatactgtctcttcaaaatctcagcggagggtgccctctgttatcctgccctctgtgtcagtataagccaaaggtttgaatcctggctctgcaactatctacctctgtgcctctccttgtttatgaaattacagggctggagacaaagatcacaatgtgaagacaaaattggagagcggtcctaatcagccagagcaaaatttctggctcttgctcttccccatcctgggttgaatcataggaacaggtggcaagatgccagggtcaggagattccagaagtggcagcaagctcagtgttaccaggtcagggatgacctgtcttattattgaaatctcagagatatgctccaattccggcccagagacacattgagagacaactggggaacttgctatgttcctgaacaggcaatgagctgtcttccaagaaaaaacctgagacccttcaagtctcaggtcttacttagcacatataccaggtcttacacaggacacatggttacaactgactgaaatctgggctgggtgtaggagctcacacctgtaatcccagcccttcaggaggctgaggcaggcagattgcctgagcccaggagttcgagaccagcccgggcaacatgacaaaaccccatctctacaaaaaatagtcaggcatggtggcatgcacctgtagtctcagctacttgggaggctgagatgagaggattgcttgaggttgagactgcagtgaagcatgatcatgccaccgcactccagcctaggcaacagagcaagatcttgtcgcaaaagaaagcaaaaacacaacataacacaacaacaacaacaacaacaacaacagcaaaaaagccaacttcttgaaatctggaaaggacacctggactgccctgagcatttgattgttgttggctctagcagtggatgcatccttcaacctctggcactctgcagggctcagactgttctgttctgtttgttacctgtggagtgcctgccagaccctgctctagctgctttaggtccatttaccctcatagacccccagtcttgttattcatatttcatatttgggaaatggaaacttagaaacttgccaagtccacagcatgagatcctgcctccggtgtctgctggattccagaaagtgccaggggccaacttagatgacaccatgttctctgcacaatcttaggaatgctcctagtctgatgtccccattgcaaaatttacattatcttttaacaaaacgtctttccaaggaggggcatttaaaataactgaggttcttcttgctaaggacgttcctgacacaagagataatttagcatttccttttcattaaaaagtttgaaatcctgtaatttgtgataatgtggatgaacctagaggatgttaagtgaaataagccacacacagatagacaaataccacgtgatctcactcttatgtggaatttttttttaaataagttgcttagccgggcatgatggcacacacctgtaatcctagctactcaggaggctgaggtgggaggatggcttgaactcagaaggtggaggtagcagtgagctgagactgtgccagtgcactccggtctgggtgacagaatgaaacccaatttaaaaaaaaaaaaaaagttgctatcttagaaaaagacagtagagcagtggttaccagagactggggaggaaagagaggaggtgagaatgggcagcagttgatcaacgggtacaaagttaccatgagataggagaaacaagtgctggtgctctgctccaagtagggtgacggtagttaataatgaattctgtatatataaatagctagaagagagggttttcaatatcattattatttcaaaagaaatgataaatgtttcagaggatggatatgtaattaccctgatttgatcattgcacaatgtatacatgtagcaaaacatcacattgtgtcccataaatatatacaattattatgtgaattaaataaaaaaaaattttaaagtcttatctaaatgaaatttctaaccagattctgaatccatgataccactgaaaccagcacacatgatcgcagtaaaacctcattatacttcctccactatcaccaataccctttattctctggaacatgaaacattctgttgtgctcatatcatgcaaattatcactagtaggagagcagagagtggaaatgttccaggtataaagacccacaagataaagaagctcagagtcgttagaaacaggagcagatgtacagggtttgcctgactcacactcaaggttgcataagcaagatttcaaaattaatcctattctggagacctcaacccaatgtacaatgttcctgactggaaaagaagaactatatttttctgattttttttttcaaatctttaccattagttgccctgtatctccgccttcactttctgcaggaaactttatttcctacttctgcatgccaagtttctacctctagatctgtttggttcagttgctgagaagcctgacataccaggactgcctgagacaagccacaagctggtgagttgtaggcattttttccattactttctgattcataggctcaacgcacctcaaagctggaaatgccgggtctgggtacaccctggggaactgcaaagcctgcacacttgggggaaatgatcaagatgagaggcaggggtggggatggcatgtgcaccaggagatgttagagaaaccctgaggaagagcagcgtgcagcaggtgatgggggagagtgggcagcaagcgaggccaggacagccactctgctcagtcaccagtccacacacccaggggctcactctgcccctctgagcacccaaggacgttaaagagctggaactgttagtctaaatataggaccatccaagctctgaaccaaaatgtgtcccttgcctcaactcaggagatccacagaggcagaagtaaggaatttattttctgaaagatagatttctatcagttctgggtgacatgttctgacacttgaaatgacacctaggacagcacatttcaggcatcttgctcattgttcactgtagtagaagctacatgctagccagttgtaaaaatgaaattaagtaatgtgtgcacagcatttaacatagcatctgagcttcaggagcactcaattaatgaccacagttgtgattctttaggcagatgcatttttttccaactttgatcagaggtcttatttagcttctccagatttcaagaatctggctcagtgatatgaaatacaagacttgtgaaaagtgtcaattgcaagagaaatggaaggataaagtatacaggtgggtggaaaagaaattcacagtcactgccagaaaaaaaattcttgagaatcaagtcctgatgatgttagggcttatagttcttattataaagagttttatgtactcattcagtgaacatttattggtgcctcctttagccaggtactatcataagagctgaaaataaaagcataatccagtccttgatcttgaggaacatgctgtgtgtagcagataacataataagtgcttatctagatgcatgcagtgttatgtgataagagtaatatgacagaggatacagattaggcttcacagagaagggggatttgagcaggaggtattgaagggtgaatagaagctcaccaatcattttgggcagaggggcaaggacctgcaaaaccactgaagcatgaaggaaatggtgagtttagggaaaatgaagagaagatggctgtgactgaagcacaggatttgggattggagaagggactggaggtgaggctgagaagaggcaaactcagaaaagatgttgtgctgggcagtctggacattatctttgaagcccaccacatataagtcatagggctactggaggttttaagctaaaagtgactattcaatttcaacttaagagaagataggttgagagggaacatggcttgagatgagccatgagcaaaggaaagactacaacaaagccaggagtgaggagtgtgtgaagcaagaaagtgacagttgaaagcagtgcagaggggatgaatctgagaggcatctatgaggtggaactcaaatgacatgataataatacagggcatttctctgtgtcagatgctgtcctaagtccttactccattgatcttcacagcaactcagcatagttaatattttatgcataaagaaatcggcacttgaaggagtaattggccccagattacactgcctataaggattcaaatccaggtttgtttggctccaaaaactggctcctaattttcagaaggagaagcgacccagggcaatgcccaattttgcttcttaggcaatggaggaatccacaatcggaaggagttttcagcagtgccccatttggggtgggttgaatttgaggtccctgcatgatacccactttgctcacttcagtgcctaaaactgagtatggttcatagtaggtgttcaataagtgttgatgcagtgaatacatgcatggggagatatgcatcaggcaatgggaaattcaactctaaggcttaggggaaagctggagcttgaagacagagctttagaaaacagtagcatagaagggagtaggaaccatgagtttagacaatacaattcaggaagaactttgtagcaaggataaagaggcaaaaaattaaagaggtgagagctaagtgtggtgcctggggaatcttaaggtgtgggcacggggaggagatgccagcaaagaacatgaataaaaagcggtagcacagcccctcccatctggaagccaaaaagaattgtaaatggaggaagttagcagaaggatcaaatacttgaagagggtggaattggaataaaaccagggcatttgaaaaattgggttgtcactgcaatcttaacaagagaagttttggcaggatgatggaggcagaaagctgagagaatcatcagttagaacgtttttgacttcagagaacagaaaatgcagttcataatggctttaaaacaggggcttgtttttctcccagcaatttgagaggccaaggcgggtgcatcaggaggtcaagagaccgagaccatcctggccaacatggtgaatccccatctctactaaaaatacaaaaattagcggggcatggtggtgcacgcctatagtcccatctactcaggaggctgaggcaggagaatcacttgaacccaggaggtggaggttgcagtgagctgagatcatggccactgcactatagcctggagacacagcgagactccgtctccaaaaaaaaaaaaaaagaaggcagaaggtgaatagttcaagggtgggtttaggactcagtgataataggattctgcctggcttctcatggttctctaggtcttccattcatggcaccatgccctcactaggcatgctgccagagcaggaggggcaggtggagggttctcttgtgtctgtcttatcagggaagaagagctttctcagaagcccccagcagactcccttttcatattatggtccagcaatgagtcacagacctatgcaccacctgcaaaggagccagagaaaacaaacgcccagcgcttttagcctgaaaatgagaatctggtttgctggggaagataaagggtgtcggaaaatggctgttgggtaaatcattgatgtctgccactaggaatgaaaggcaaatcaggaactggcacacatgctttcagggagatggctgcaagggagagggcaaagactgggaagttgcttatgtggtgccagactatttggaagatcatggattgcggtgtttgtgttgtgtggtcatcattttgttctttgtttacagaacagagaaagtggattgaacaaggacgcatttccccagtacatccacaacatgctgtccacatctcgttctcggtttatcagaaataccaacgagagcggtgaagaagtcaccaccttttttgattatgattacggtgctccctgtcataaatttgacgtgaagcaaattggggcccaactcctgcctccgctctactcgctggtgttcatctttggttttgtgggcaacatgctggtcgtcctcatcttaataaactgcaaaaagctgaagtgcttgactgacatttacctgctcaacctggccatctctgatctgctttttcttattactctcccattgtgggctcactctgctgcaaatgagtgggtctttgggaatgcaatgtgcaaattattcacagggctgtatcacatcggttattttggcggaatcttcttcatcatcctcctgacaatcgatagatacctggctattgtccatgctgtgtttgctttaaaagccaggacggtcacctttggggtggtgacaagtgtgatcacctggttggtggctgtgtttgcttctgtcccaggaatcatctttactaaatgccagaaagaagattctgtttatgtctgtggcccttattttccacgaggatggaataatttccacacaataatgaggaacattttggggctggtcctgccgctgctcatcatggtcatctgctactcgggaatcctgaaaaccctgcttcggtgtcgaaacgagaagaagaggcatagggcagtgagagtcatcttcaccatcatgattgtttactttctcttctggactccctataacattgtcattctcctgaacaccttccaggaattcttcggcctgagtaactgtgaaagcaccagtcaactggaccaagccacgcaggtgacagagactcttgggatgactcactgctgcatcaatcccatcatctatgccttcgttggggagaagttcagaaggtatctctcggtgttcttccgaaagcacatcaccaagcgcttctgcaaacaatgtccagttttctacagggagacagtggatggagtgacttcaacaaacacgccttccactggggagcaggaagtctcggctggtttataaaacgaggagcagtttgattgttgtttataaagggagataacaatctgtatataacaacaaacttcaagggtttgttgaacaatagaaacctgtaaagcaggtgcccaggaacctcagggctgtgtgtactaatacagactatgtcacccaatgcatatccaacatgtgctcagggaataatccagaaaaactgtgggtagagactttgactctccagaaagctcatctcagctcctgaaaaatgcctcattaccttgtgctaatcctctttttctagtcttcataatttcttcactcaatctctgattctgtcaatgtcttgaaatcaagggccagctggaggtgaagaagagaatgtgacaggcacagatgaatgggagtgagggatagtggggtcagggctgagaggagaaggagggagacatgagcatggctgagcctggacaaagacaaaggtgagcaaagggctcacgcattcagccaggagatgatactggtccttagccccatctgccacgtgtatttaaccttgaagggttcaccaggtcagggagagtttgggaactgcaataacctgggagttttggtggagtccgatgattctcttttgcataagtgcatgacatatttttgctttattacagtttatctatggcacccatgcaccttacatttgaaatctatgaaatatcatgctccattgttcagatgcttcttaggccacatccccctgtctaaaaattcagaaaatttttgtttataaaagatgcattatctatgatatgctaatatatgtatatgcaatatatataggctcttgcttgatctctccaggaggtagtgattatgagaagggggtggagaatgatgagttccttcaccaggagcaaaggacggggatcgtgtggaaccactgcagaactatttccggaatcaactaagtggagagagccaggaaggctgcatcagaacccagtaaagcttcttgtctggatctgagctggtttgttttgtgcttgcttttccctgccttgccactcccctcactcttctcttttccccacagcctttttcacatagctcttggctgtaggattgccccactccaaaaaccagtgtgtggaggtccaggagtgagaccaggaaagaatgtgaaagtgactacacaaggactcctcgatggtcgtggaaaaggaaagtcaattggcagagcccctgaagccagtcttcaggacaaagaaggagcctagagacagaaatgacagatctctgctttggaaatcacacgtctggcttcacagatgtgtgattcacagtgtgaatcttggtgtctacgttaccaggcaggaaggctgagaggagagagactccagctgggttggaaaacagtattttccaaactaccttccagttcctcatttttgaatacaggcatagagttcagactttttttaaatagtaaaaataaaattaaagctgaaaactgcaacttgtaaatgtggtaaagagttagtttgagttactatcatgtcaaacgtgaaaatgctgtattagtcacagagataattctagctttgagcttaagaattttgagcaggtggtatgtttgggagactgctgagtcaacccaatagttgttgattggcaggagttggaagtgtgtgatctgtgggcacattagcctatgtgcatgcagcatctaagtaatgatgtcgtttgaatcacagtatacgctccatcgctgtcatctcagctggatctccattctctcaggcttgctgccaaaagccttttgtgttttgttttgtatcattatgaagtcatgcgtttaatcacattcgagtgtttcagtgcttcgcagatgtccttgatgctcatattgttccctattttgccagtgggaactcctaaatcaaattggcttctaatcaaagcttttaaaccctattggtaaagaatggaaggtggagaagctccctgaagtaagcaaagactttcctcttagtcgagccaagttaagaatgttcttatgttgcccagtgtgtttctgatctgatgcaagcaagaaacactgggcttctagaaccaggcaacttgggaactagactcccaagctggactatggctctactttcaggccacatggctaaagaaggtttcagaaagaagtggggacagagcagaactttcaccttcatatatttgtatgatcctaatgaatgcataaaatgttaagttgatggtgatgaaatgtaaatactgtttttaacaactatgatttggaaaataaatcaatgctataactatgttgataaaagatttaaaaacaactggctgtttttttacactgtggtgtggaagattgtgttgtgttcacaacttttcacttcttcccctgtgtgattacacacacctgcccttgtggtgtgacttgcagtgcgccctacaggccacacaaccccatgccctccaccactggctctgctgctggaatgtgagcagaagtgacatctgcctcatccaagcagagcctcttgctcagccacaggaaggcccattccagatcacacccgtcagcccgtgcgccctggtgaatgagaagacacagggagctgcagccacatataacatgagcaagaagtctgtgtttgctgtgataagccactgagttttaggggttgtttgttaagaagcacaaaaaccgattaagacatgtggtatatagtgacttcatatatagaatctggaaaactatccatttattttcaatcatggaattcaatatgacaagcatcccggagggtctacctatgccagactgggttggaaacagaaagacagatgttaatgccagtgtcctttacacctccaagtccagggccagctgtggagtgggaggggtagagaaggtcctgtgcacagtcacagtgcgctgtgcagagcaggaacagaggcatctgtgaaaagtgctgagagcctggaggacagagtgactaatgcaatgacagtcttgcatcataggaataacagccacagcaggattttattgctgccaaagaaactgccatttaaaaattgccagccatccgggaggctgaggcaggagaatggcatgaatccaggaggcggagcttgcagtgagccgagatcgggccactgcactccagcctgggcaacagagccagactccatctcaaaaaaaaaaaaaaatgccagccatctctctttctaaagtggaatcctcaagtctcgtttattctggggacatttgagtaggctgttcgagttaagcaggtggaagttgatgatccctcatcatcattctgagggatgagtgtctgaagactttttggtaaggaagggtcttggcatagcccaccccatgccacctcccttgatctgtgatatccccagcagctggggaggttggagcattttgcaaagaggccccgaagcctccagaaagtaaaccttcaagagcccatccttccttcctcttttgtttttgctcattatgaaaacttccctgacaaattgaaaaggcttcaggtgagattagcccacaggaaaaaccaccaagggccacccagaggggccacactgtgacagaaggagtatgggctggtgagctgacctctggaagacagtgcatgaattgaggagaagagattggttccaggcatgggaggaatgaggctggaaatttcttcagacattgccacttcggcactctgtgtgtgtgtgtgtgtgtgtgtgtgtgtgtgtgtgtgtgtgtgtgtgtgtgtaaacagagtcctgtaatgcaaggtccggccttggcagccccagcctggagccacagtgagatgtgagctgagggttatgctgggaaaaacctctccctcccagcacctgaaaggctctgcaggcccagcagctcagcaagcaagggtaagggcatggactaacatcttatttcatactatcccttataacacatcctaatgtaatcagctcacaatatgaaattatttcatttctctccagtcattgtttcaatggggccttagggttgactggattctggaggtccctgcctagaggagggggtgcattctgtccctatgtcccctcctgctccatcctccacagcacgtgcctagtggtctaccttgtggggaattcttgtacctccctcttctaggcatggactagcattgagaagtgggagaggagtgttaggaaaaagggcaaatatagacataccttgtcttattgtgctttacagatattgtttttgttgttgttgttgttgtttacaaattgaaggtttgtggcaaccctgcctcgagcaagtctattggtgctgtttttccaacagcatgtgcttgttttacatctctgtgtcacattttggtaattctcccaatatttcaaactttgtcattatttctatatctgttatggtaatctgtgatcagtgatctttgatgtcactattgtagttgttttggggcaccatgaagtgcacccatgtaagatggcaaacaatcaataaatgttgtgtgtgttctgactgctccatggactgcctgttcctgagacacaataatgtatatataacaattatatatatatatatttataacaattatatatatatatattttttttttttttttgaggcagagtcgcactctgattgcccaggctggagtgcaatgatgtgatttcagctcactgcaacctctgcctccccaggctcaggtgattctcccacttcagcctcccaagctgggactacaggtgtgcaccatcacacccggctaattttttttttgtatttttaggagagacagggttttgccatgttgcccaggctggccttaaactcctagactcaaacaatccacctgcctcagcttcccaaagggctgggattacaggcatgagccactgtgcccagcccaagacacaataatattgaaattaagccaattaataaccctacaatggcctctaagtgttcaagtgaagggaaaagtcccacgtctctcactttaaatcaaaatctagaaatgattaagcttagtaaggaggacatattgaaagtcaaggccaaaagctcacctctgcaccagttagccaaattgcgacttcacaggaaaagttcttgaaggatatttaagctctactccagggaacatgcaaatgaagagaaaacaaagcagccatattgctaatatggagaaagtttgagtggtctggagaaaagatccaaccagccacaacatttccttaagtcaaagcctaatccagagcaagactctaactctcttcaatgctatgaaggcggagagaggtgaggaagctgcagaagaaaagtttgaagctagcggaggttggtttgtgaggtttaatgaaagacaacatctccataacataaaaatgcaagatgaagcagcaagtgcaaagggagaagctgtggcaagttatccagaaaatctagataagataattgatgaaagtgtctacacgaaacaacagattttcagtgtagacaaaacagtcttatgttggaagaagatgccatccaggactttcacagctagagaggagatgtcaaggcaagctgcaaagctccacaggacaggctgactctctttttagaggtgaatgcagctgatgactttaagttgaagtaaatgttcatttactattttgtaaatcctggtgtcattaagaattatgcgaaatctactctatctgtgctccataaatggaacaataaagcctggatgacaacacatctgtttacagcatggtttactgaatatttcaagcccactattgagaactattgctcagaaaaaaagattcctttcaaaatattactgctctgcaccatgtcgatcaagagctgtgttggagatgtacgagaatattcatgttgttttcatccctgctaacacaaacatccattctgcagtccatggaccaagactttcaagtcttattaagaaatatatttcataaggctattaagaaatagctatatatatatatatatatagccttatatagtttatatagctaccattgatagtgattccattgatggatctgagcaaagcaaattgaaaagcttctggaaagtagtcattattctagatgccattaggaacatttgtaattcatgggaggaggtcaaaataccaacattaacaggagtgtgaaagacattgattccaacccccatagatgactttcaggggttcacgtcttcagtggaggaagttgctgtagatgtggtggaaacagcaagagaactagaactagaagtggagcctgaagttgtgactgaattgccgcactctcatgatcaaacttgaacagatgaagagttgcttcttacatatgagcagtgaaagtggtctcttgagatggaatctcctcctggtgaagatgctgtgaacacggttaaaatgacaacaatcgatttagaatattacataaatttagttaataaagcagtggcagggtttgagaggattgactccaattttgaaagaagtgggtaaaatgctatcaaatagcatcacatggtatggagaaatcttttgtgaagggaagagtcgaccaaggtggcaaattgcattgtcatcttattttaagaaattgccacagccacccccagctttagcaaccaccaccctgatcagtaagcagccatcaacatcaaaacaagaccgccatcctcttcagcaaaaacactatgacttgctgaaggctcagatgatggttagcatttttagcaatacaatatttttaattaaggtatgcacattggtttttctgacataatactattgcatacttaatagactacagtataggataaacacaacttttatatgcactgggaaaccaaaaaggttatttttgagatatttgctttactgtggtggtctgaagctgaactcacaatctcaccaaggtgtgcctgaacctctttagctaactggccactgccacagtccactctgtgttggtcaagatgccccagagtggcaggcacactgtgtggtcacatccaagggcctagatatggtgggggctccaaatggatctagatatgtgagatctctctttgatttgacttcttccaacccaccattttctgggtgctgggctcatctcacccagaaagtaggacccaatgtgacagttcctgcccagttccctcctgtggtagccacttgacccaggggcactcttgatccttgcagcctcacttacacaccctatctctacccctattaactctctccaatccccactccccctgctcagcttgtctgctgcccagtgggggccccacccatgctggcctctccttttgcaagtccccattcctcatatggtttcttcagagcccctttctttggctttgaggagagatgccctcactcgcttccccaccaatcctgcccacttctacaatccattcattatcctaattgcctccgtatacagactggagtgagaggagttgatgtgatgggtgtggatacagggctggtgctgtcatcttctagtaagccctgggagaggtgtctgagcccaggtgtcagtggttttctttggaactgtgagtgcataacacttctttgccttcagccttaggccatagttgctagttctgggacaaccagaaaagccctacataatctcgtgttatgtgcagagctgagtatagagctccaggtatgatctgactcacttaagatcacagtgagtctattgtattgttgaactgttagcttagacatctgttactgtacctacatggcactagcctcacgcctagacaccgatctgaaagaaatcccctaaatgcatagagaagacttctcagctgagctaaggggctcccaccaggtttgagcctatctaatgaatccatgaggtagacagcctgcacatgtccacttggtttgatgaattgcacaaatccctatgggggatgtggttcatgggctgggaagtgggttaccctgggaaaggtctacaggacagaggcagggatggagacaacagcatggtgagttcccaacccacccacgatgataggtgtctgaggcagaaggtaaagaggctgtcacctggtgggtgtcataagactcaagtgtcattgttgaggcacatgggtaacaaagcgtggcactggatgggggtagattcttcctatttctgtgaggatcagggggactccctggctctcctgctaaaggtggctctagggacaggaagagtgtacttcttgacagggatgtcagagcactgatggtgacaatcagtgtgacactgctcacatgactgaacaaccgagaagagcccgactgtctactgaacaacgggaagagcccgactgtcaatgacggagctctgttaaatatagttaaggctattttgttgaatgaatgaagccagacaggaaagaggacagtatctttaatccatttatagaagttaaagacaggcttatttaatctctatgaagacagagtggcccttacctctgggtggagcaaaaggcaccttctgaagtgatagggatgttccttatcatcttgatccggagtggtagttacatgcatgtatgcatatcaaaactcaccaagctgtaccactaagtgtgttcttcctcaataaaaataataaagaactacacttataaagaattttttaataatataggaaaatgtctacactataatctttagctaaaaaaaaaaaaaaagaagccgcctacagaatggtatatgcatgagaacaattaatcgaaaagtgcatgggaaaagtcaggattgaaacatcatgttttaaaagacattgttttgatactgtgagaatgtacctaagtttttccttttttctgtttttcccaattttatacaatgagcatgtgttggttttataattagacattttgtttgtttggtttggttttgagacacagcttgctgtcacccaggttggagtgcaatggcccaatcttggttcactgcaacctccatctcctgggttcaagagattctcccacttcagcctcctgagtagctgggactataggggcgcaccaccacatccagctaattttgtgtatttttagtagagatggggtttcaccatgctggccaggttggtctcaaactcctgacctcaagttatccactcgccttggcttcccaaagtgctgggattataggcatgagccaccgcacttggcctagacatttgtttttaaaaataaaagattcatttgctctttttacagcccgtctcactgttgactgatattgaccaggagtcaactcaggccccagggattttcacaacagctgctgtatggcagggtttctgctcactgtgctcatgtagttggcccttgcacccaaagtgaataattaacattctccccatcctgttgacgatgctctgaaaatatggtccagaaatggtgtgagcaaggagacagcaaagcaatgcttggaacataggtgcagtgactagacatggggcagctgtttaaagacaaaaaggccccaaaaaggagggatggcacgaaacaccctccaatatgggcatggagtctagagtgacaaagtgatcaaaagttcatttcctatggggtgtccgaatgtacttaataataaaaagagaacaagagccatgcaaactgagagggacaaagtagaaagagtagcagacaccaagcaactaagtcacagcatgataagctgctagcttgttgtcattattgtatccagaacaacatttcatttaaatgctgaagaatttcccatgggtccccactttcttgtgaatccttgggctgaacccccctgtcctgagtggttactagaacacacctctggaccagaaacacaaaagtggagtaacacacactgcaaagctgtgcttccttgtttcagcctgtgaatcctcaccttgtttcccatctagcctatatttttcaaactaacttggccatagaatcatgtagtatttagggtggaagctgccccaggtctagcacgtcatttaacagatgaggaaatggaagcttgggcagtggaagtatcttgccgaggtcacacagcaagtcagcagcacagcgtgtgtgactccgagcctgctccgctagcccacattgccctctgggggtgagtatgtcttcacatcctccaataccctaatgacagacaaacagaacatggcaaagcctcagctctgcatggtgaaagtaagaaccagcaattgccacaaacagaaatacagtgttggtccggcagcctccgggggttctgcacaagtggattaccagtgaatacaaggctatctatctttcgaaaaaccaacgttgtatttatgctattttctataaaattttatattaatttatttgttacctatttttgaactctttcaaaagcacactttatatttccctgcttaaacagtcccccgagggtgggtgcccaaaaggctctacacttgttatcattccctctccaccacaggcatattgagtaagtttgtatttgggtttttttaaaacctccactctacagttaagaaaactaaggcacagagcttcaataatttggtcagagccaagtagcagtaatgaagctggaggttaaacccagcagcatgactgcagttcttaatcaatgccttttgaattgcacatatgggatgaactagaacattttctcgatgattcgctgtccttgttatgattatgttactgagctctgttgtagcacagacatatgtccctatatggggcggggttgggggtgtcttgatcgctgggctatttctatactgttctggcttttcccaagcagtcatttctttctattctccaagcaccagcaattagctttaccttttcagcttctagtttgctgaaactaatctgctatagacagagactccggtgaaccaattttattaggatttgatcaaataaactctctctgacaaaggactgctgaaagagtaactaagagtttgatgtttactgagtgcatagtatgtgctagatgctggccgtggatgcctcatagaatcctcccaacaactcatgaaatgactactgtcattcagcccaatacccagacgagaaagctgagggtaagacaggtttcaagcttggcagtctgactacagaggccactggcttagcccctgggttagtctgcctctgtaggattgggggcacgtaattttgctgtttggggtctcatttgccttcttagagatcacaagccaaagctttttattctagagccaaggtcacggaagcccagagggcatcttgtggctcgggagtagctctctgctgtcttctcagctctgctgacaatacttgagattttcagatgtcaccaaccaccaagagagcttgatatgactgtatatagtatagtcataaagaacctgaacttgaccatatacttatgtcatgtggaaaatttctcatagcttcagatagattatatctggagtgaagaatcctgccacctatgtatctggcatagtgtgagtcctcataaatgcttactggtttgaagggcaacaaaatagtgaacagagtgaaaatccccactaagatcctgggtccagaaaaagatgggaaacctgtttagctcacccgtgagcccatagttaaaactctttagacaacaggttttttccgtttacagagaacaataatattgggtggtgagcatctgtgtgggggttggggtgggataggggatacggggagagtggagaaaaagggggcacagggttaatgtgaagtccaggatccccctctacatttaaagttggtttaagttggctttaattaatagcaactcttaagataatcagaattttcttaaccttttagccttactgttgaaaagccctgtgatcttgtacaaatcatttgcttcttggatagtaatttcttttactaaaatgtgggcttttgactagatgaatgtaaatgttcttctagctctgatatcctttattctttatattttctaacagattctgtgtagtgggatgagcagagaacaaaaacaaaataatccagtgagaaaagcccgtaaataaactttcagaccagagatctattctctagcttattttaagctcaacttaaaaggaagaactgttctctgattcttttcgccttcaatacacttaatgatttaactccaccctccttcaaaagaaacagcatttcctacttttatactgtctatatgattgatttgcacagctcatctggccagaagagctgagacatccgttcccctacaagaaactctccccggtaagtaacctctcagctgcttggcctgttagttagcttctgagatgagtaaaagactttacaggaaacccatagaagacatttggcaaacaccaagtgctcatacaattatcttaaaatataatctttaagataaggaaagggtcacagtttggaatgagtttcagacggttataacatcaaagatacaaaacatgattgtgagtgaaagactttaaagggagcaatagtattttaataactaacaatccttacctctcaaaagaaagatttgcagagagatgagtcttagctgaaatcttgaaatcttatcttctgctaaggagaactaaaccctctccagtgagatgccttctgaatatgtgcccacaagaagttgtgtctaagtctggttctcttttttctttttcctccagacaagagggaagcctaaaaatggtcaaaattaatattaaattacaaacgccaaataaaattttcctctaatatatcagtttcatggcacagttagtatataattctttatggttcaaaattaaaaatgagcttttctaggggcttctctcagctgcctagtctaaggtgcagggagtttgagactcacagggtttaataagagaaaattctcagctagagcagctgaacttaaatagactaggcaagacagctggttataagactaaactacccagaatgcatgacattcatctgtggtggcagacgaaacattttttattatattatttcttgggtatgtatgacaactcttaattgtggcaactcaaactacaaacacaaacttcacagaaaatgtgaggattttacaattggctgttgtcatctatgaccttccctgggacttgggcacccggccatttcactctgactacatcatgtcaccaaacatctgatggtcttgccttttaattctctttttgaggactgagagggagggtagcatggtagttaagagtgcaggcttcccgcattcaaaatcggttgcttactagctgtgtggctttgagcaagttactcaccctctctgtgcttcaaggtccttgtctgcaaaatgtgaaaaatatttcctgcctcataaggttgccctaaggattaaatgaatgaatgggtatgatgcttagaacagtgattggcatccagtatgtgccctcgaggcctcttaattattactggcttgctcatagtgcatgttctttgtgggctaactctagcgtcaataaaaatgttaagactgagttgcagctgggcatggtggctcatgcctgtaatcccagcattctaggaggctgaggcaggaggatcgcttgagcccaggagttcgagaccagcctgggcaacatagtgtgatcttgtatctataaaaataaacaaaattagcttggtgtggtggcgcctgtagtccccagccacttggaggggtgaggtgagaggattgcttgagcccgggatgatccaggctgcagtgagccatgatcgtgccactgcactccagcctgggcgacagagtgagaccctgtctcacaacaacaacagcaacaaaaaggctgagctgcaccatgcttgacccagtttcttaaaattgttgtcaaagcttcattcactccatggtgctatagagcacaagattttatttggtgagatggtgctttcatgaattcccccaacagagccaagctctccatctagtggacagggaagctagcagcaaaccttcccttcactacaaaacttcattgcttggccaaaaagagagttaattcaatgtagacatctatgtaggcaattaaaaacctattgatgtataaaacagtttgcattcatggagggcaactaaatacattctaggactttataaaagatcactttttatttatgcacagggtggaacaagatggattatcaagtgtcaagtccaatctatgacatcaattattatacatcggagccctgccaaaaaatcaatgtgaagcaaatcgcagcccgcctcctgcctccgctctactcactggtgttcatctttggttttgtgggcaacatgctggtcatcctcatcctgataaactgcaaaaggctgaagagcatgactgacatctacctgctcaacctggccatctctgacctgtttttccttcttactgtccccttctgggctcactatgctgccgcccagtgggactttggaaatacaatgtgtcaactcttgacagggctctattttataggcttcttctctggaatcttcttcatcatcctcctgacaatcgataggtacctggctgtcgtccatgctgtgtttgctttaaaagccaggacggtcacctttggggtggtgacaagtgtgatcacttgggtggtggctgtgtttgcgtctctcccaggaatcatctttaccagatctcaaaaagaaggtcttcattacacctgcagctctcattttccatacagtcagtatcaattctggaagaatttccagacattaaagatagtcatcttggggctggtcctgccgctgcttgtcatggtcatctgctactcgggaatcctaaaaactctgcttcggtgtcgaaatgagaagaagaggcacagggctgtgaggcttatcttcaccatcatgattgtttattttctcttctgggctccctacaacattgtccttctcctgaacaccttccaggaattctttggcctgaataattgcagtagctctaacaggttggaccaagctatgcaggtgacagagactcttgggatgacgcactgctgcatcaaccccatcatctatgcctttgtcggggagaagttcagaaactacctcttagtcttcttccaaaagcacattgccaaacgcttctgcaaatgctgttctattttccagcaagaggctcccgagcgagcaagctcagtttacacccgatccactggggagcaggaaatatctgtgggcttgtgacacggactcaagtgggctggtgacccagtcagagttgtgcacatggcttagttttcatacacagcctgggctgggggtggggtgggagaggtcttttttaaaaggaagttactgttatagagggtctaagattcatccatttatttggcatctgtttaaagtagattagatcttttaagcccatcaattatagaaagccaaatcaaaatatgttgatgaaaaatagcaacctttttatctccccttcacatgcatcaagttattgacaaactctcccttcactccgaaagttccttatgtatatttaaaagaaagcctcagagaattgctgattcttgagtttagtgatctgaacagaaataccaaaattatttcagaaatgtacaactttttacctagtacaaggcaacatataggttgtaaatgtgtttaaaacaggtctttgtcttgctatggggagaaaagacatgaatatgattagtaaagaaatgacacttttcatgtgtgatttcccctccaaggtatggttaataagtttcactgacttagaaccaggcgagagacttgtggcctgggagagctggggaagcttcttaaatgagaaggaatttgagttggatcatctattgctggcaaagacagaagcctcactgcaagcactgcatgggcaagcttggctgtagaaggagacagagctggttgggaagacatggggaggaaggacaaggctagatcatgaagaaccttgacggcattgctccgtctaagtcatgagctgagcagggagatcctggttggtgttgcagaaggtttactctgtggccaaaggagggtcaggaaggatgagcatttagggcaaggagaccaccaacagccctcaggtcagggtgaggatggcctctgctaagctcaaggcgtgaggatgggaaggagggaggtattcgtaaggatgggaaggagggaggtattcgtgcagcatatgaggatgcagagtcagcagaactggggtggatttggtttggaagtgagggtcagagaggagtcagagagaatccctagtcttcaagcagattggagaaacccttgaaaagacatcaagcacagaaggaggaggaggaggtttaggtcaagaagaagatggattggtgtaaaaggatgggtctggtttgcagagcttgaacacagtctcacccagactccaggctgtctttcactgaatgcttctgacttcatagatttccttcccatcccagctgaaatactgaggggtctccaggaggagactagatttatgaatacacgaggtatgaggtctaggaacatacttcagctcacacatgagatctaggtgaggattgattacctagtagtcatttcatgggttgttgggaggattctatgaggcaaccacaggcagcatttagcacatactacacattcaataagcatcaaactcttagttactcattcagggatagcactgagcaaagcattgagcaaaggggtcccatagaggtgagggaagcctgaaaaactaagatgctgcctgcccagtgcacacaagtgtaggtatcattttctgcatttaaccgtcaataggcaaaggggggaagggacatattcatttggaaataagctgccttgagccttaaaacccacaaaagtacaatttaccagcctccgtatttcagactgaatgggggtggggggggcgccttaggtacttattccagatgccttctccagacaaaccagaagcaacagaaaaaatcgtctctccctccctttgaaatgaatataccccttagtgtttgggtatattcatttcaaagggagagagagaggtttttttctgttctttctcatatgattgtgcacatacttgagactgttttgaatttgggggatggctaaaaccatcatagtacaggtaaggtgagggaatagtaagtggtgagaactactcagggaatgaaggtgtcagaataataagaggtgctactgactttctcagcctctgaatatgaacggtgagcattgtggctgtcagcaggaagcaacgaagggaaatgtctttccttttgctcttaagttgtggagagtgcaacagtagcataggaccctaccctctgggccaagtcaaagacattctgacatcttagtatttgcatattcttatgtatgtgaaagttacaaattgcttgaaagaaaatatgcatctaataaaaaacaccttctaaaataattcattatattcttgctctttcagtcaagtgtacatttagagaatagcacataaaactgccagagcattttataagcagctgttttcttccttagtgtgtgtgcatgtgtgtgtgatgtatacaaagagagagataattgtatttttgtattttcttttaaataatttttaaaattgacccttttcctgagacaaattgccagaatagtttgtatttagagatggtacctctaagagtaaggttgctggttgctgagcaattgacttgaaaacttttaaaattcaaattttaattccactactcaaaagaattgccatgttttaaaaaagagaattggtgccataagttagttgtctatgtttgaaaatgaagaagatatgcaacgtcatggcctggtcacttacccgcagccctgagttgtaggcacatcatatgtgagaatgaggatgcttttctttcatttaaaatccctccccaaaacttggctctaattgcagtcatgacaatcatgtacatttggatttatgtgcacgagtctcttaccctgagagaggacaggtgctacaggtggaggggacccgtctgggtcacgttcacattttgaacatgctggttttcagtcactgcacactcatctcccagcgcaggtcatgggcagcagatgcaaaagctgcccgtggtcctatttggaggtgcatgaaatgagcagaagacagaatagcttgatctgactagaagggcagcttgtccctaccaagacttgaaggattgcctttcatctgttagggtaaaaggtagaatgaaccaaggaagggcaggagggggctggggttagggtagaaggaaggggccatggagaagggagatccatcccataggaggaaggcagtgcggcagggaggtttgaaggtatcagcttttgtggctgacatacatgcagtcatgtcaattgctcgtttttccttttccatcttattaaatgtcttccaatgttagcacgaagaaaagctatttgcagtgttgccagcctttccagagcccgtccccattacctccccaggcccatgcctttactccttggagtttcaactcacgaccttcaggatctgactttattcaccaactctggggtgaacgtaccttctgtctccacccagaggtctctatcaaagaggagattgcatgccatggataaagtcaaagtagaggtgactgtccttaggaagagtaatgtgaaaattcataaactgggattctgtttacattttgtactccaggggttcttagtttaaatcgctctgaataaattaagatgcaatggcatttcaactgttatgattaaatttacaaatcatttattttctatcacggggagagatagagctccaaatgcaaacataactgctcaagtgttaacacttataatgaaaacataagaattaccaccaactaccctgggggctagaagcagaaatgtgaaccagaaaacaaatcatgaactttcctttttttttttgagatggagtctcgctctgttgcccaggctggagtgcaatggtgcgatctcggctcactgcaaccactgcctcccgggttcaagcaattctcctgcctcagcctcctgagtagctgggactacaggcatgcaccaccacgcctgggtaattttttgtatttttagtagagacagggtttcaccgtattagccaggatgctctcgatctcctgacctcgtgatctgcccgcctcggcctcccaccgaagtgctgggattacaggcatgagccactgtgcccggccaacaaatcatgaactttctaactgcagttccttgtagcttgttaacacatccacttacttattgtcagagtacgtggagattttccacaaccctcggggataaggctgaacagaagaggcaaaaacgtgaaaacatttcgatagctcctatactttgaaataaaattcactgtaaaagttgcttgtatttttccaaaacagagtcaacccttaatatttaagattctgtatacaaatacatatttttatataattaatatatattgtcatatgacatatatctttatattaatatgcatgcatataatatatatttccttcctaattttctataagcaattttacaagactgacttctatttgcctccttattgttactacgtggtttgataatccgttttgtgtcattgtgattctgtcatgttttggggacttatttttgtttctctgggtggtcactagtttttttaaagcattcatggaagagtgtgaatcttttacaagctaggaagccatggcaagccttgggtcatactgcccccgcgaggccacattggcaaaccagcaagggtgttcaacttccagacttggccatggagaagacatacgaggaggcttttcacattcagctctttaatgtttgtctctgccggcaccatcccagttgtgaataagaggtatttccacagcggctcagggtaggtagtgcacagctcacattcatcatttctgaaaaccgagaggagtctccattcggggtacaggttgatgcctgtcgtggaatgaaggttccaacacccagaccaatctctgcagtgtgctgctctcatgagcttgcaacaagatcagaaaatgttttgtgactaagcatttttcatattgcataaaatgcttcaagctcctcccttgtttctctctataatcctgtatatctgatgattgtgggtaccaagtgtttgaaataatcaaatgtgatttgatgttggtaaatttctttttttttttttttttacttctattttttttattatactttaagttttagggtacatgtgcacattgtgcaggttagttacatatgtatacatgtgccatgctggtgcactgcacccactaactcgtcatctagcattaggtatatctcccaatgctatccctcccccctccccccaccccaccacagtccccaaagtgtgatattccccttcctatgtccatgtgatctcattgttcaattcccacctatgagtgagaatatgcggtgtttggttttttgttcttgcgatagtttactgagaatgatggtttccaatttcatccatgtccctacaaaggacatgaacatagcaaagacttggaaccaacccaaatgtccaacaatgatagactggattaagaaaatgtggcacatatacaccatggtaaatttctttatcattcgcactctcctttctctattattgttattgtaactgaaccgcagattagtcactcattgcttgcagaatccaattaacaagagcgaggtcagatataaagaaaatgatttattccaaacctccttcagggaagaggtgcagcctcctgcctctaaatgcactgcttcgccaggcgtggtggctcacacctgtaatcccagcactttgggagaccgaggagggcagatcacttaaggtcaggagttcaagaccggcctggccaatatagtgaaacccctgcctctactaaaaatacaaaaaattagccagacgtggtggcgggtgcttgtaatcccagctactcgggaggctgaggcaggagaatcgcttgaacctgggaggtggaagttgcagtgagctgacatctagccactgcactccagcctgggtgacagagtgagactctgtctcaaaataaataaataaataaataaataaataaatagtaaatgcactgctttgcttttggagcagaaagcaggcactttgaaaaggcaggggaggaagtgagcaagggcagggggtctgcacactggcatggtgcctgatctatccaggcagttgaattggcactttcataggcagaaataagttgaaaaagtggcctaaaactctctaggtgggagtggatagtgggcatgccttcaacctgcctttctggagggtgagttccatggcaaccccctgaagggtgagagttccatggagatcatgctttggtctgtaaatcagctgttaactctctagaaagttctgtcttggagcatatagttagatgaacttgccctgtaaagaatgtctggtgaaggggaagtaaaaggtgagatttgcatttctaaagggctaagtagaacgtggggtacaagaggaaaggagaaaagagaaaataatttaaaaaataattgtaacttattcccttttacttagaaaaaagggaatactcagttacattatcacctcgtttacatcaaaccctcttatggaatcctatggtttgaaaacaaaaaggttgttgaggaccagtgagcccaacccctttgctttataaatgaagagcattgcctgccctaagccccagagactctgatgtcgtgggtctggagtgggctccaacagcggcatgttttgatggtgcttcccagtggcacgccagcgatgagcctttgagtagggaaagtaggagcactcgtgactcccttcacgatcagcacctgtgtgctaataaattcacaaaagccaacatattggagtcactcagggagttttacaaatagtgaggttaaatccaacctcaaatagttctgattcgatctgcctgcattgctgccctgtggttccccactgtagaagctccccaggtgattctaagtgtagccaagtctgagaaatactgcctaaagcctgttggactgacagcaagggctgttgtctgagcaagactttgcctggcctggggtggcatgtgcaccaggaagagtctcaactttcataacagaacattccccaagctggtttttttaaagcatgtgaatctagacttcattggcaataccaaagatctgtatttgaggctccaagtatttcactttcatttttggttttgggttatgttttcacccttcctttccaagtgaaaagtaaacagaagtgggatgtctggcgcccatgctgagcttggcaacttcaaattcaatagagaagaagtctcttgtatagaaaagggcctgtctgagatgtttctcaaataaatatagattttgcttatgtggctaaaggattcttctccccccatttccttatccctgcagtgagccatccttcttaactctttccatgaaagcattattcctgaagaactgggaactcatgccagccctgatcaggcaatgataattctgcagagaattagaatttagatttaaattgtcaactcttatacatcctggcatatggtttaaacacatgtacacacacacaaacacctcctactatttactgaagagcagatatctgataacttaatctttttggttttgagtcaagacaattcctccttttgaaactgcataccgctgaatataataaaatgtaattaagattaaaaataagaaactaatgggagaatttcaatattgtctctgttcactttaaaattcctctacttaggtttactgccattaccaaagactattcaaaaatcctttttaggagaatcctaatggtttcctgacatataatcaaataaggactctgttgattggctaactcaatcttcctgtgccaaaaagcagagcccagcagagaagagggcagggacttgaaagtcagactgactcgagttccagccttggggctgtgggagcttgggcaagtgacttaacgtctctggctctcaggatctaaaaggatttccagtagtaatttggggtgttactgatacaggagctaaaaagaaattatttaggtggttagtgagggtcagagagtcctcggtaagatttgccttttaacaaaaagcagccccaaaatcatttgtttgctaacaaagagaagcctgtaaaattgagctgcagacatagataagcaagctggaagcttgcacgggtgaatgccggcagctgtgccaataggaaaaggctatctgggggccaggcatgttcaacatggattctccatcttcccttttctttgtcaaccaagtgtacagtaaaggaacaggcaacatggcacgggccaggtagagaacccttctgcataataaaagattagggtgagatggccagcttcttcccgtgctatgtaaatggcatacctggtccaaccagtcttttgggccctgtgtaaatcagacaccgcctcctcaagttagtctataaaaccccatgcattttaccgtgaaactgggagatccactcggaaccccctcctgcacgagagaccttttctcttttgcctattacacttccgctcttaaactcactgctcatgtgttagcatccttgatttccttggcatgaggcaatgaaccttgtgtattaccccatacaaatgatgctgcttcattactaatagcaacctgacagggttgtgttggggtataaattatctagaccagggagatccaatataatttttttgtaatgacgggaatgctttgtatctgcatcatccaaaatggtagccaccaggccagggtgaaatgtggccagtgtgactgaggaactgaatgttttccatgatttaatttaaatgtggccaatggctactgtaggagacagtgtgagtctggcatattataaataataaatattaatataatttgaactttggcatcagtgtttcctagatttgaattactatgcaagttgcttactgtttccaagcctcagctttctaatctgtaattggggctaataatagtatctgccttacaggtttgttcagaggataaatgagaaattgcatgttgagggcttaacacagtgcctggcacataaaagctctggtaacagttagccactttaataatttgctaataatggctatttcttcttcagattaggatgtgctcccccaaacagtgcacttagacatagcgggcaatccagctcactctctgcagtgagagagaagcactggccgaccagagtcagccaggggctcatgggtatgaaatcaacagcatgattttgtaagtaatggatggaaagggcctcacaactttatggcactgtgttcaatttgcttggtcttctgtagctccttttgaaagccttttagggtggattaacctgctaccaataattctggtcagatgtagactccatagctcaaagcaaactgagagagtgagggcagcaggccaattccccaccccttccttctggactctgacagaagcttacactcaaggaagagcaagtaggaattaacgtgttaagagctaggtaagcaaaacccaatgagaagttctggcaaagccccatgggcaggggtggcttaggcacaggaaacaagtaggatttcataccacgcgcctcagtctacttccggggccctcatcctcagctgtgcctatgcaaaggagagcaaccaataaaccccaccgccactctcctactgtggaggccagggatggccaggggtaagagagggatgggaagtgtttcctccagccgtcctctgagaaggagaggaaactgggcagagcttctgtcctccttcaagcagaaacagaaacaaaagaaacccctaagggggttcttacttcccctctagttcagttgtgcactaaccatctgcagctcaacattcagcattcattcattgattcagcaaacattgaaggagggccagctatgtgccagatgccaactcatgccatgaaagagagtccctgtccttatgaaattcactatttagagagaaaagcaagcaaaaaggcaaagtttgaaaagtactgttgaagtggcatcattgtctggggtgaatacctgaggtttgtggtctcacgccaagggaatcaaggactcaggcacacaagaagtgagtttaagagcagaggtttaataggcaaaagaaagagaaaaaagaatagctctcttgcctgcacagagagaggggcacctgagtggatcttcctgttttgtggtgaaatgcaaggcattttatagacgagcttgaggaagtggtgtctgatttacttaggacccgagagattggtcagaccaggtgtgatgtttacatagcatacaaagaagctggccatcccatcctaatcttttattacgcagacggggtctatacctggctggtgccatgttgtctgttccttactgtacacgtggttgacaaagaaaagggaagatgaagaatccatgttgaacatgcctggcccccagatagtcttttcctattggcacagctgccggcattcactcttgcaagcttccagattgcttatctatgtctgcagcccaattttacaggttgctctttgctagaaaagaaatgatttgggggctgcttttcattaaaaggaaaaccttaccaaggttaaaaagaaaaaaatttctttttaatgcctatgttactgtgaacagtgtcgggataaggctctgagagccagatgaggatgagttatccaatccaaggatgggggtctggaggaaaaaatcctagagagcattgctgcagttgaataaggattagttagaagctactgagtggagcataggagtaggaactcttatgcaaatgtgcagaggtgaaataaagcaaggtatagtccaggtgcctaaagtagcacagctgacttgagatagatgatagataggtagatagatggatagggtacatagatgatagatagatagatagatagatagatagatagatagatagatagacagacagacagacactggtgtgagtgtgggtgtgtgtgtctggctgcgtgcatgcattcctcctgcaggagatcaggagcagtgggcagtatggagtgacaagaagattgggaggtactccttctagccctcccctctgctctgccctccactggagcagaagcaaagcatatggtgaaggggaacaaggagtctccccagcacagtacccgagtgcattagctatttatcactccacagtccccattcacgtgttaattcagcatttattgaatgcttactgtttgcaatgtctatgtcaagctgtcaagtgtagtttttattctacaggccacaggcaccccctaactgtgttaaacaagatggtagtattgagacaggaataataagggtggtcacaggagaatggaagattccaggcagcagtttgactagtaaaaaaggaaactgttgaaatagctgcataatccaggggtcaataagaacctgagaaccagggtgtgagccaaggctggttaaaagcaactggatccaatatggtgctgagtttctcctaggttttgcctggaacctcattatatgctcaataacataccaaatcacacacccaccagggccattccatttcctggaacactcatgtttggtgtaaaaatgggtggcaccacagctctgagaaatctttacctttttcaggaaacttcatgaatattccatcctttggttaaagaaacccataatgtagaagccccaaaccctactgggcgcaactctctctctcttgagtatgcctgcacttccctttattatttatttatttatttattatttatttatttattttttagatggagtctggctctgtcacccaggctggagtgcagtggcgcagtctcagctcactgcaagctctgcctccagggttcaggccattctcctgcctcagcctcctgagcagcagggactacaggcgcccaccacaacgcctagctaattttttgtattttcagtagagatggggtttcaccatattttattttatttttgagacagggtctcactttgttggctcgctgcaacctctgcctcccaggctcaagcaatcctccaacctcagccccccaagtagctgggaggacagacgtgcaccaccacacctggctaatattttgtatttttttttgtagagacagggtcttgccatgttccccaggctggtcttgaactcctggactcaggtgatcagcctgcctccaccttccaaagtgctaggattacaggaatgagccaccccacccgaccacactcccatttcttgagtgtgtgcattttgctctgcaataaatctctctactttcacttttctctgactcgtccttgaattccttcttgtgacagcgtcaacagcctggacaccaggtgcagtcaacgtctcaccagtgtttagggacctcccctaatccactggtatcagcatgatcagacttgctttttcagaaaaagccttctgtccatagaccaaagggaagtgactcagagaaggggcaggaggaatcacaagctccctgcctgaccaggcctggactatggcagagacagtgagatggtgagaaagcaagggtagacagccagccaaatccagaatatagaaagttctacaggaaaaggtggggccaaggtgggacagggggaaaggaattgttgcacattaacagtgcaatgcagagcactggtcttgtttatgtccaggttagaacaaaccaatgagaaagcacatctttgagacaactggagaaatttgaacactgactagatataatattatgttaattatgctttaatttggggtacaataatgcttttgtagctatttctaaagagtccttatctcttaaggatacactctaaaatactagtggattaagttatatgatgtttagactctttttaaaataatccagtggggtgagaggcagagggaagggagaggagcatagaggaaacagtgttggccatatgtttgtaattgttaaaactgagtgatgggaatatggagatttaacatattaatactattttctgcccatgtaatatttgaatattttcataataaaattgagagagagataaagaaagaaaagagaaaagaagagaagagagaagagataagggaagtggaggaaaaagagctttcttcaaggaccattgtggtggacacaaatgaaagatacccccttcctactatgaattctaggtgtgtactacccaagatgagtcaatcggatcctagcttccagaaatcgtgagcatgatgcagccctacagacgcagtgccctggaaaggagacccatgaccatccaaggaagatgtcccatcacagaactgccctgggtcatgtgttttccaagtccacatgtccggtagttccttctttcctatgaccaatgccaccagtcttccagcactgtcctttattgctaggcaaacctgagccatcctcttcttcttgcaacttgtgcctgaagtaacatggacacaaagtccccacttttcccacattctcagaatgaagtagttctccctccacactttaggtgctagaggcaagtggattgcttgagctcaagagttcaagaccagcctgagcaacatggcaaaaccccgtctctacaaaaaatacaaaaattaactgggggtggtggtgtgcacctgcagtcccagctactcaggaggcagagaaggaggatttcttgagccctgaaggtggttgtgttacgtgcattcatgttaagagaccaccaaacaggctttgtgtgagcaattaagctttttaatcatgtgggtgcaggcagactgagtctgaaaaaagagtcagcaaagggagatagggatggggcggttttataggatttgtgtaggtagtggaaaattacagttaaagggggttgtcctcttgcgggtacaggcgggggtcacaaggtgctcagtggggagctcctgagatttattgtccaggagaaggaatgtcacaaggtcaactgatcagttagggtggggcaggaacaaattacaatggtggaatgtcatcagttaaggcaggaactgggtattttcacttctttgtggttcttcagttgcttcaggccatctggatgtataagcgcaggtcacaggggatatgatggcttagctcgggctcagaggcctgacattcctgtcttcttatattaataagaaaaacaaaacaaaatagtgatgaaatgttggggcagcgaaaatttttgggggtggtatggagagataatgggtgatgtttctcagggctgcttcaagcaggattaggggtgacacaggaacctagagagtgagagagattaaactgaagaaagattttgtggtaaggggtgatattgtggggttgttagaaagagcaattctcatatagaatgattggtaatggcctggatgcagttttgtatgaattgagaaactaaacggaagacacaaggtctgaataagagaaggagaaaaacaggcattaaaggactaagaactgggaggacccaggacatccaattagagagtgcccaagggggttcagcataattatttgcttggttggtgagtttttggtctccatccttgagttttttttatgttgtcatatgccaggccagattgatttaggtaaaaacaacactcttcatttaaaaatatacagagttctcctttctcagcagtgagtaagtcaaggcctcagcagttttggaggaaagagaaatgcaaaggaagcaattgtttgttaagaaggattagaaatggctaggagagagtgagtgagattgatagtgtggtggagatagctgaggagaggtagagggtggcataagaatgggaacgagaataagagtgagtataaaagtaaagaatagaacttcatcagggtgaaagtattggagggtgccctgtcagcaaagatcatctgtccactccaagagggagtcaagagtggcggattggggatagtaccaggagatatccactatgatggtttggaggaaaagtgtaaactggcagtgtaaacaggggcagggcatttatgagtcattgagaatggtgaataggagtatgactagacagaagatagtggagatgacaaattttgggggcacagtccaaatagtgggggtgactgcgtagagctctgttgcaaaaagtagggtaaggataaatagacttaatagaatgaagagatgtattaggctcataagggttattattgttcttcagaaatgcgagtgagtttaagggaagtaggggtgagtacttgcgacttccagaaggaagaggagagatcaggctggctgtctgatgggcacagctttattctggaacagtgaatccaatggggagggtcgtgcagacggatggcagttggggtgctataaatgaccaggtagggtccagtccatcaaagctgtagagtgtgaggggtcagacttgacaaggactgattgcccagctaaggtatcttcacatggctgggagtttggaggaggcaagagaagattagcagcctggcgaatttcctgtctagcctgctggaggactggaagataaaggcaacaggtcgtgggcctggatcctgtgtgaggactctagcagcacagccttgtatttcagctgtgtgtaaggaaaaaggatgggacgagtcggggagtgctagtgtgggagctgtctccaggtcctttttgagagagtgaaaggaagaatggggaaaagacttatggtctatgggattagttaaattaccctttgtgagctagtaaagtggtttgattaggatagcaaagcccggtatccaaagttggaaatatccaacaatgcctaagaaggaagggagttgttgtttggtggtgggggttggggtctgggagattaactgaacagagtctgcaggaagggtatgtgtatgttgatggagcattataccaagataggtaatgctaggggaagaaatttgtgcctcagagggcaatactttgtacccctttgagtaaagatgttgaagaagcaggctagtgtcctgctgggaagattggtaagaggggctgcaaagaagaagatcatcaacatattgaataaggtgggaggtagatgggtgaaaagaaagcagatcatgagaaagggcctggccaaagtaatgtgggctgtccctgaagccttggggtagaaaaatccaggtgagttgttgggactggtgggtgtcagagtcagtccaagtaaggcaaaaagaggctgggaggagggatgcaaggggatagtaaagaaggcatctttgaggtcgataacagaatagagttgtggaagggtgtattgaagataggagggtgtacgggtttggcactataggatggatgggaaggacgatttgatcaacaagacgaagatcctgaacaaacctgtaagacttgtccggtttctggacgggtaggataggggagttgtaaggagaatttgtaggctttaagaggccatgttgaaacaggcaggtgataacaggctttaacccttttaaagcctgctgtgggatgggatattggcattgagcggggtaagggtgattacattttaatgggatgataaggggtgcatgatcggttgccaaggtaggagtagaggtttcttatacttgtggattaaggtggggagatacaaggggaggatgtgaaacaggtcttgagttgggtaaaagtgcagcaaagagatgtggctgcagcccaggaatactcagggaagcagataatttggttaaaatgtctcagcctattaaggaagctggacaggtggggataactaaaaaagtgcataaaagaatgttgtccaagttggcaccagagtgggggagttttaagcggtttagaagcctcgccgacaatacccacaacagttatggaggcaagggaaacaggcccttgaaaagaaagtaatgtggagtgggtagcctccgtattgattaagaaggggacagacttaccctccactgtaagagttacccaaagcatctgtgatggtccaggaggcttctgaggtgatcaggcagtgtcagtcttcagctgctaagctgagaagatctgggaaggagtcagtcagagagccttgggccagagttccaggggctctgggagtggttgccaggcaagttgaacagtctgatttccagtggggtctcgcacagatgggacattccttggcccagtggccagatttccggcacttgaaggaagatcctgggggaggaggtcctggagaaatgcctggcccctgcagtttaggtgttttgaagttcttgtgtgctggagatgtggctggggtttctcttacagcggaggcaagtaattgcaactcagaaatatgttgtcacttggctgcctcttttctattattgtacaccttaaggcgagggtaattaaatcctgttgtggggtttgagggctggaatctaatttttggagctttttctaatgtcaggagcagattgggtaataaaatgcatattgagaataagacggccttctggcacctctgggtctagagaggtaaagtgtctaagggttgttgccaaacaggccatggactcagctgggttttcatatttgatgaaaaagagcctaaacgctaactgatttgggagaggtcagctaaagaaaaaggagcattaaccttgactatgcctttagctctagccacctctctaagaggaaattgttgggccggtgggggagggctagttgtggaacgaaactgtaagccagaccaggtgtgaggagagaaggtgaccaaaggtttatagggtaggggagcagaggctggggaagaattgggacctggctaggcctagcgaggaacagcctggggaggaggggagaaatcagatgggtccgtagaaaaggaggattcaaaggactcagagcttggggtggagactgaaggaacagacaggagagaaagaggaaagatttgggatgagtcacattgggagcagagactagagagggactgatgtgtaaagaatgcctggacgtcaggcacctcagaccatttgcccattttacgacaaaaattatctagatcttgtaggatggataaatcgaaagtgtcattctctggccacttggaactattgtcaagtttgtattggggccaagcagtattacagaagaaaataagatgtttaggtttttaaaagagtgcataaaagaatgttgtccaagtccatgcccttcttaatcaatatgggagctacccactccacattaccttcttttcaagggcctgtttcccttgcctccataactgttgtgggtattgatggccaggcttataagccccttaaaattaccccactctggtgccaacttggagaggtcaggtgttagtcaaaggtgttttaagttttaagaacacaggctaagggagaagaagggggaatgaagcgtggaaggttgcccatagtgaaagaggtaagtttaaagagaaaggtagagacatggagaaggggggaggtgagcagccctgggctgtcatgtgggttagcagccaaagctggtgtcccagcaattgacttaccaccaagggaatgtgggtgaatgaccaaggcaggcatccccccggtgatcagacaccaaatggaatgtgggtgaaagatcaaggtaggtgtccccatgatgatcagacaccaaaggaaggctgtcttcccaaatccatgatccatgttggagtttttgagttcatggataaaatgtgtctcctttgtctctactagagaggaaaaagaactggaatttgaaggacagggagattgaagggtagggagagaggctgaagaagagagtgaggagaccgcttacccggtttgaaattggtgagatgttccttgggctggtctgaggacctgaggtcgtaggtggatcttctcatggagtgagggtgaggagaggggaccaatctcccgaaggagtcaccctgtccggggtcttcggcaccaaatgttatgcgcatccatatgaagagaccaccaaacaggctttgtgtgagcaataaagctttttaatcatgtgggtgcaggcagactgagtctgaaaaaggagtcagcaatgggagttagggttggggtggttctataggatttgggtaggtaatggaaaattacagttaaagggggttgtcctcttgcaggcaagggcaggggtcacaaggtgctcggtggggagttcctgagactcactgtccagaaggaatgtcacaaggtcaattgatcagttggggtggggcaggaacaaattacaatggtggaatgtcatcagttaaggcaggagcggcctattttcacttcttttgtggttcttcagttgcttcaggcaatctggatgtatatgtgcaggtcacagaggatatgatggcttagcttggactcagaggcctgacaggttgctgcagtgagccaagatcacactactgcactcctgcctgggcaacagagccacaaaaaaaaaaaaaaagaaaagaaaagaaaaaaaaagaagaagaaaaaaaaattttttttccaccaagaatttagtaaaaaattatagggaaaagtgtcactaattcaagggaattgcactgaaaattattcattcattcaacagatatttattgagaagcaagtatgctggtgctagggttacaacagcgcacaaattcttgtattcaaggaatgaggtaagagtatgcagataggagccagagaggtcaagaggcaattgcaacatagagtgacacgtgctccagaacacataggagggcttccaggccccatgctgggctatcagagctggcttcctgcaggtggtgtggctcagctaaaacctgagaaccaagaatgagccttctgatatctcagggttaaatcggcacaaatgaaaccattttataaccaaacaacattttccctcctgaactgcactttttctagaacccatttaatccttcctaacatgttcaatccagccccgtgatttttcagtcaaatgcaagatgcgtaggattccttttctgttcagtgctccccagccaatctttttcccttctcccaccccacagttactaattccagcgtttcagttctcagcagaggatgacagttccaccaggagacatcagtgttatctggagacattttagttgtcccagctgagggcacagtgctgctggcatctagtgggtgaaggtcaggaatgcacctcaacatcctggaacactcaggacaatccccagcaacaaaaacctacccatccagaacatcaacagggctgtggctgaggagccctgctctagtgcttcctccttactgtatcctcatcaaggagggctctggggcatgtcaggggctgctacaggctcctggcagatttcggcgacttactccagacttgtggaacattcaggattcttagcatggccacaggagagtcaggctgtccacaagcactctctctttcttcacccactcattcctgtcactctaccatttccactgccttcccaaatgcccatcgtgagtcccaccaggggccagaacaccactctctcaagcctccccagtggcgcgtgcacacctggagaacatgtctcacatcccccagccagcgagacgtcctgagattccagcacttctcagtgtctttcccagcttgtttgtatctggaatggggtggggtctctcacacaggagaaattacaaggaaaagtgtacgtgacaggaatggaggaatttctgtggaaacggtgtgtgagaaaatgtaggaagaaagaaacttcaggaaatggtaagtggcatcttgagagcagaaagtgagaagggagcagaaagaaatggggctggaacctgggaaggagaggacaggtggggatggccttgcacaccgtgggcactgaggagtgtgggcccatggcatgggtggagaggagtttcaagatagggagtagattcctattttgaacttcggattgcccctggcgatgtggagactgtattggaagaaggcaagaatggaggagagcccctaggtggaggtttggcaatgctctctccagaatatagcagaggcctcttccaaggtaggaaagccctgactggagagaagttaatggctctgagggctcaagggaggacttggattatcaggacttttagggaggcatatgatcaaggcttgggtcttggcccattgaaatggggagcactggttttaggatgtgggtcaattagtttggttttcaggacaggctgagttggatatcctgggggacctccaggtggcagtgtcaggggaagctggatgtgctgacactgaactcagcagagtgactgagtagagatcgacatctggggtcacaggcagtggatgccgtaggggtggactcaatagctcaagcagaacccggaggaatgcaggcagcaaagggagccctaaagaacagtgaggagatgtgccaagaaagagccaaatccgggggattggctgtgggagagagggctgtgggagtaagaggaagtgtcagcaacgtcaaatgttgcagagacatagagtaaggtaagagtggaaaaaacatccatggaaccctgtgatgcaatcggaatgcagaaagactttgtaactcctgcctggtctcctcctctgcccactcatggcaaaggaatacaaagtaatgttccctccttccgcctagaaaagcacaacttctgcccccaagccctgggctctcctgagaggacaggaccagcctctgaagttgaaggtcctggttctgcccccaagccctgggctctcctgagaggacaggaccagcctctgaagttgaaggtcctggtttaccagatagggaaggggccctttccaagaccctttccagaaggtgtggctgagatgggaaccgtggactctgtgcagatgtaggagctggctccagtcaagtgctaggaggttgtgggtcctgggaaggaagaggctctggagcctctgtggagactctgggactgtccttgggggagacgtgagcaggaagaagcagggccttcacagtccccagcttaggggcctcaccacccagactgaagaccaggaccaaaccctttcctgcacagttacaatgtgtcatttaattttactaaagggaatattttttaaatgaggatgctactttgtgtattaatttttacctctattcataaaagaaacgtttcttatctatttaagatgattcatatcagaccagtgtctgcccaactcgactgaccctgtgaaaactgggcacttcacactccaatgatgatggatgagtccccagcagcatagtttaagggagtgagtgggcagtgtggcctcctgtgcacgtgacttcctccttcagtgtgcccacatgtgggttccacggtcttgtgacattgtggctttagaaatttctgtttccattttctatcattcagagtaaatgaaatttgcaggaaattcagaaccttccacctgtacagtggatactgtgagactctgcccagatgccctcttcaagccaatgcatctctccatgctcccactcccatagatgggaacagaggtgctggaactcagatctactcccctttctgggaactggagctgcctgcccaggcaatgcccccttcccagggatggctgagccaatgactggctaatgttggattgcagaggcctagcgccctcccctcaattcctaattccttgtaggaataactgaggcctcctctgtgaccacgtgggcagcttctccctctgcctggtcctgtcttgttctctcctttccaattgtgtctcctggaagccctccccacaagtctgctgcatacaactctccttctcagagagcctgagccctggattcccaggaatccagcctaaaatagtctggcatttggtttcaattttctctttcactaagactcagtcacaggtgctaataaataataaaatgtcaccaccttgaattctatcactctctcttttcttgccccatctctgacaagtaggtggtccctcaagaacctgaaaagcagacattaggaggaaaggaggagtgggggcaagaggcccacacctcacctggccggctcccatccatgcgcccttgactgaggtaacacctaccctgggaatccttcccctgcctctcgtgagccaggccgggtgctcttgggacagctcccactgctcctgtgtgctcccccagcttggcacatgactccctgaattatagtcagttccgtacctgaatctccctctagaatgccagtgccacgaggacagaggacggttccactttgttcactattttctccccagggtctggcaaagttcctgggacttgggagaggtgtccttcaggagcttggcagaagccaaacggcacacttaagtagggcaactgaggtgagtttaatgaaggattctatacaaaaatttggacaaggtatagggaggccacaatacacagtgcagtgcctggtgccagtgagagcagggcactattcccactgcaaggccagacagggcaaggggagggagctgcctgacaagagctgcccttacgtcaagggacacatcagcccactagaccccatcaggagggagccagggcctgactcccctgaccttgctctccaatcttctgcctaaaattccccatcagccaaacacaactgaaaactgaaagacaggggagcctgctgttaataaggtgagcttcccccagaataaagctgggtagagagtggagaatggatatggaagggcaaaaggaagatttataagacagtgggcactaaatatctatgagatgaataaaggaaccacattttacaacaaacggtcattgaaacgctactcaatggaaagagatcatttcggtcactgtctggtgcagacaaatcaaagcccacatgcatcaaaaaggccatgtccgtgtaactccgacacggggcagacagcaaggctgaagcctatggggtatgtggagccggaactgagagatcctgatgtaaatctagcacttgggaaaagggggactagaagaaattcacccacaggcagaggaaaacacaaacacttatctatttttgcctaggctttaagtggtatgggaaaaatctctgagactacaaatcctgtgcttcatgcacaggtttataataccctcaaaatggaagaccccaaaaccaggcgcggaaaattcatatcaggccattgatgccctcaatgttcccggctgaaacaaactcaaaactcctctggaaaggagtgctcccacttcaagccatgaaaagctactgcagagaaaataatccccagtcaagacacactcacattgaaactgcaaggcacacaaggaaatggatcaccttgagtgatagctggcagagctaataaacctctgtatacctctaagaagctccacgcactagtataacccttaaagatttgatgaaatcattactttattaaaattgtttttataaaaaatcaaaatccaaaaaaagcaacaaattttataccagagccaattcggtatatacaagggtgtcttactcttttggaatttgtcttattgtcctaactcagcacattgtcctggtctatgaaaagtcctagaaacccttctaccctctgtaatgtaggagctttaactcaatagggttttttaaattcttttttcttgtctttttttcttttttaattttttccattttttcaagtcaaactgaagaaatatttttcttttctttctaggaatgcatattcaccccccaaggccacttgtctcctgattggagagtattagacaattctcaggatttctttattttccttctttattccataggattgggaaacccagtaggattgggtttaggcatatctctaaagcaccatgtttcaacgttttgatgtaagattgtgccctatttcttgttcagttgctgccagcagatgttatagttttaaaactagtttttggtcattgagatattagaggagggaagagtctgctatcctgctttactcatcttcatctacactacactgtcatcttcactgcaaagtcctgtattaatgtttttagattctataacattttaacaggtgtcaaaaaatcttaagcaccacttcagcttgggaatctctaaatgtaatggtgtttgtgggctggactgatgtctgcgtcttgttgttgttattgtctgtagtaatggagagccgggagatcctggacacttcctgttcatgggcacttgatgcattagctgccccagcagctgattacatttaaacaaggatgtgtgggtgaacccagggagaccaatctcagtggaatggtgggggcagaagccaggctgcagggtgtagagtagggaatgagcagtgatgaagtagaaacagagtttggacaactagtgaaactgcctggaagagggggagaagagacagtaaatggtctgaccaatgtttgaggtcaaagtgggtttgtaatctttatttaagggacagatctgagcatttaaaaattctgaataatctaatagagaggaaaaagttgggactcaaagaaaatgtgggaaaaaatgatgaaggttaaacggaatgagatccagagtgcagggggagagattagcctttggtgttagaggagcaactctgtccatggagagaggaaaaatgtagacataccacagttgcatttgaagttggggcctgaggagttgaggagttctgagaaaagcagaagatgagatcatttcctgagagtaaatgggagtcattagaacgggggtgaagagactggaagctttaggtagcttgaaatagttgatggaaaaattggataaagtgacaatttgtcacactcagaacagctatcagggaatctagaagaatctctggaagctagttgaagatcttaaattaccaatgtatcttgtccacatagctaagcggttttacttatttttatttttttgaaacagggtctcactctgtcacacaggctggagtgtagtagtagtagcacaatcacagctcaatgcaatctctgcctcccgggctcaagcaatcctcccaccccagcctcccgggcctgggactacagacacacaccaccactcccagctatattttgtacatttgtagagacagggtctcgccatgttgcccaagctggtcttgaactcctgggctcaagtaatctgcccacctcggcctcccaaagtgctgggattacaagcttgagcccggctgctaagtggttttaaacagctgttctcggaaacacacactcaaagaaaaaatgtagaggataatttatctaaggctggggcttcaagagaggtcagggtgttgacaagagaatgactaagtggcagactactggatctcagctagataaagagggatgtgatcgtgggaggggctgatagtcagaggctggaaggcttgatgaacaacacatattacacaaagaataaatggagtgagagaaaccaaaggagtaaaagttgtcatcagaaaagtgagaaattttattgtgagaattcagtggtaaatcaatgttaacaaacctcagctgggcactagtggagtgaaaccgaaggccagggagttgagttaatgagctgagacttgggcaccagatgggggtccacatggacaactaagccaccaggatgatgtgggaaactggggtgaatagaagccccttatccatgtgcacaagtcttgaataaaataggggcaaccaggcagtcagtggatgatagcagtgaggtggagcagagagcaatgtagttggagaagtggagcccacagcagtctcctttatatctagaagggaattaatagccaaaaaatggcaccgaggccaaggatgtcaccttctgactcccaaatctgagacagatgtgagagggaaggagtatcctcaagggacaggagatggtgcgaatgtttttggcataaatcaaagatgtcagggaaattgtcagaattcaggttccagagacacagaggaaaagcgtgggagaaagtggaatattgggaggtgagattagggcagaggaagcacaaatcaaagaacgaggaatagaaaaagtcatatgagctgaggagttggccaaacatgacagaatgggaatatgatggaattaagtggctttatgtgttccaaaaggattggtccacgcaggccacaggaaaatgggaggtaagaagaaagggatcgaaatgctgcaaagtgtattacttcatggtaagcaaaggactcaagactctagaaaatgatgcccttccttccaagactatgttagtccaaatctttcaagatacagaacccaaggtggggtctggcatacaagaagtataatagaggaaatgtctgtgacatttgcaggactgcaaagggagccaggagaagctgggaaagccatgagatcacaagcaggtctgactccaagtgaaggagatggggaatgacgcaaggtttggctgaagcatgtgccaaaggcacccatcagaggagtccctctccaagggatgggcctatcatagtgtccctaatagtgtcatggagtgggagcagcccacggagggcacagccttggcatgaacgcagacatgggtctcagagtgcagcagctgggcccctcagtcaattaggctccctcagagctggggcaggaggtgcactagaccacacagtaatatttatttattattaatttaattaataatattaatttattaatttaattaataatatatttatttatttattattactagaccacacagtagtatttgtatgtctaaggaagcatttctcagaatatactcactgaacttttagcctataagtacctgtatgaaaattttaaaaggggtttcatgatcaaaacattttgggaaacactccataccctttcttcctcatgaaggatcataatgcctattagtatatgaagggctctgagaagtcctgtagtaaagaaacttgctttagttttttagtccagcaatttttcaaacttaaatgagcaatagcctcccatccttttttttacactttttagcatactgcggaataaactcaacatgcattgagaaagactgctttagggaatagtcaacactatttcactcccagtaagtacatataaaatctgtatttccagggtggattatcaacacagctgtattttagaaatattatctgccctcccaggtatcacagctactaattattgggtactgaggtggaattttagggatcagccaattatgggaaagaaaatctgggggcaggataagatggtctccgaagccttaaaattatatgccattatttacctctttgatctactactcaatatcaaacaactaattcagaagaaaattgattgttttctaaaagtagtttttctacatttcccattaagaagcagtggtatttaaaacttataatggctattatgtgagattatcactatcatagtttttctctatacaaattttctgtaacattttatttgctaataaaaattagatagatggattgactaattgataatctaagaaagattatatttgaagaagccatagtaagggacagattaaattatcatcagtctaaacattctaatacctatttctctttttttgaaattttccaaatttgttattatgcatttaaacaataattttttgaacttttattttaggttctggggtacatgtgaaagcttgttacataggtaaccttttgtcatgagggtttgttgtacaaattatttcatcactcagctatcaagcccagtactcaataggtatcttttctgctcctctccctcctcccaccctccagtctcaagtagacctcggtgtctgttgttcccttctttgagttcatgtgttctcatcatttagctcccacttataagtgagaatacaaggtatttggttttctgttcctgtgttagtttgctaagggtaatagcctccagctccattcgtgtttccacaaaaaaacatgatctcgttcttttcatggctgcatagtattccatggtgtatatgtaccacactttctttatctaatctgtcattgatgggcatttaggtttattccatgtctttgctactgtgaatagtgctgcaatgaacattcacatgcgtgtgtcttcatggtagaatgatttatattcctctgggtgtatacccagtaatgggatttctgtttttagctctttgatctaatacctatttctcaagatcaagttagatctctaaaaaaggcatcatcctagcatttccccatcccttccctgaactaaatttaatgttgtgtgtatcaatcagcatacagtcaagacagaaaccacacatgaacattaaatataatgagttattaacttataaaagggtatgaactactaaagggggtaaggagaatgctgaagaatgcaggaatggcagatgtagagagcagccataacctctaagctaaggcacagcagccaaggaaggggcgaactcaaaaaatgccctccctccccagctgatccacccttgttggagggggtgtggctgcaacccaatggatgcccaagaagtttgcagagttgtggcaggttggggctgctgagcaggaaactgcccgaaggggtaccagtgagattcccaagaatgtgggcatgcctctggcgaggaagacgctcttggagtgccagcaaaatttactaggaagctacccagtagggtgccagcaaaagtcagcaggaagccactgtcgtggtgtcggcaaaattcactgaggagtgggcactgcagggtctccacccagcactggcaaatcagccaaaagaacaaaaacaaaataaaaacaaatcccagaaccagaaagaaaaaactctgcctcttactgcgaccctcttatgccttctacagcaactggcaaaggagaaatgtttatggggtccagctctagactcacaaagcagaacacagaagagtgaatgaagagctgaaaggcgataaatcagtaactggagcctcacatcctttgccttttttattgagggtcaatatattaagaagaatatgtctgcgtcttcggtaaaattattgctaaggttatcacccagtgtgtgttttcaacctccctgatataagaacttagtgacaagaaagaatgagacaatgatcatgaactattggacccaaccatttgtggctttagtgcccatcttctcagcaaggctttctctctctctctctctctctctctctctctctcttttttttttttttttttttttttaagatggagtctcactctgtcacccaggccggagtgcagtggcacaatcttggctcacggcaacctccacctcctgggttcgagtgattctcctgcttcagcctcccgagtagctgggattacgggcacccatcgccacccctcctggctaatttttgtatttttagtagagatgaagttttgccatgtcggccaggctgttctcaaactcctgacctcaagtgatccacccacctcagcctcccaaagtgctgggattacaggcatgagccaccacagccagctctcagcaaggctttttctgactacactatttaaaatgtgatccctgagccaccttggcctctcttgctgtccttccctgcttcgccttctccatagcacttctctcctactaatctacaatttacttgagctctgtgaaggtcaggatttttgcctattttgtccattggtgcatccccagcacctggaacagagctaggcacaggctaggcactctagaaatacttgctgaataattgaattaagtaaatgagtgatctacacgtagtggggaatgagagtatacagtgatagttccttcgactaaaactggggtcaaattatagtgataaagaggaactcagaccttcagaggtaagctttgtggaccacttgccaaggctgcagaatgtgatgtcgtttcacaaacaaggaggccctattatggcttcagatatgagaataataaagagaactttcctttcgcctcaactgcagccttctaaactcttccttccttcctatgtagaagtttcaaggacctcatggcctgagtgtggataggcagaatgctgggaatcaggcaaaaataaaataatactgaaagtgaaggtcatgctaatattagtaagccagggtgatcctgaatttacaaaacatttttctttgggaaatttcacacctcacatgattctgtgtttttacttgggaaatttcacatctcacatgactctgtgacatgcggtacatgaggtgcctgactgctgtttttgtcctctactaatgaggaagagtgtgcgtactcccagcgttttgcaagtttcaaagtctgacttgactttccttccttttcctggaactgatccatgagtatcgagagtaaagctgcccgcacctactcattcaagatcctgagtgtcctgcccagctgcaggaggtggagagacccaggaggaggggccactgctgatcccaggctgtagggggtgggaagagtgtcccagggcaccatgacccccactcactcactcacaggagacccacacaagagaggagagggcacttacagcttaggttcccaccagcaccaactcctctgccatcaaacatcattgtgtttctctttctgccttgtctgtcggcacacgtggagttaaatttaatgctcaatcacatatttgtctgggctctttctgtgtttatttttctcttaatagttctctctcctcccttcctctccccgcccctcctcctccttcttcttttttttttccagagacagtgtctcgctctgccacccaggccagagtgcagagtggcatgatcatggctcaccgcagcctccaactcctgggctcacgtgaacatcccaccttggcctctggaatgtctgggattacaggcacttgccactgcatctggctaatttttatattgtttatagatccgggatctcactatgttgcccaggctggcctcaaactcctgggctcaagcgaccctcccacctcatacttctgagtagctggggctgtaggaatgcgcctcagtgccaggctagtttcttaattttctatttctattttgacaggtacaaattttgtattcaatcctacctcagacacatctttggtgggaaaaggatgtcatttaatcaatatataaattctaagcaaataggtctgatccccaaattaggttagtcacagctgctgagtcgttgacccaagagaagctcatctagattttttcattattttcaagttcctcttctcggttcgtccttcttccagaccatgccctccccgtcccactctcttcccacagcctcccctccccacagcctcctcccaccattccaaatctgggctgttctctcaatttccttctctctggactcaaacctaccctagcccccagcctcagtttggggttaaacttgtcctcctcacattctctcccacccaacttgatgtcgcctctgtgtcatcaccacgggattttcctcctctgggttctccttttccgagtggggtcagctcccccatgagtcacagcaccaatcacttctggctgcttgcaaacccctttgctttcctcagtgttgacacccagggcagccctatgctcactgccgctgagaccccacctctgcccctggccttttcccagctgacatcaccctgtggcttccattttcctaaaattctcttttgaggcctcagtcttaaccaaagcacacagtgcccctcaaaaatgacaataaaaacccaaacacaccgtgactgtcatggcaggttcctggtccccgtattgaatcagcgggtgggtttctgcgaacactggtgagaggccgcattagagggtcaggaccctcaggtctggactcgtggtcaccacataccttcctccctgctgacagtagctggtacctgttacctactcagagtgtcacatgccacaagccagagcgtcttggcagttctcagcaccttgacatcacttccttgctaccactcagagcggcagtgacacagttcccttatctcagaaggccagaagacggctgtcaaaggtcacagggaaatcaaaggcggggtacagggccagagggaggaggaaacaacttcccggttgctttcagacgcttcagagatcctctggaggcctgggggagcttttgagtactttatttcagttggtccctgagctcggtgagtggggcgggtagagccaccaggggaatcaacagtggtttctcgtgcccctcagggtcaggagcagtctgatcaaaaggagggcatccactgtccggggccattcccacagctcccggatgctgggtctggaggctgcgcccttcccctgcaggagctcagcccagtggtaagtcatctgtgtgtcatctatgtatttaaccccttatggccatgttgatgctgagcatggtttcacttttgcaaacatttatttatacccttcgagagaaaaacgtctcagctgtcacaggaagctgcttcggggggtgagcaaactttttaaaatgcagaaattatgatctacacccgtttcttaaaagtaagccatcgtacttggttctctttaattatatattttcttacatattgtgttcatgtaggcaagtcctgtttctgctaaaagaaggtaagttctaccaaggcggtgtcatgccagctttatttcccgtggcacctggcacactgctaagcacttacatgcttaacaactagattgggaatggtgctgctctggggaagtgggcacacgttaaagaaatgtttatttcagtcttctgaaatagggaattactctggctaaaatgtagctccagaaagggaaagtggggctgtatgaatccaggtccagtttgttgtttcctccaggataaggcagctgtcggaggggaaaatcatctcccatttctccacagggcagtctgaagatggccaattacacgctggcaccagaggatgaatatgatgtcctcatagaaggtgaactggagagcgatgaggcagagcaatgtgacaagtatgacgcccaggcactctcagcccagctggtgccatcactctgctctgctgtgtttgtgatcggtgtcctggacaatctcctggttgtgcttatcctggtaaaatataaaggactcaaacgcgtggaaaatatctatcttctaaacttggcagtttctaacttgtgtttcttgcttaccctgcccttctgggctcatgctgggggcgatcccatgtgtaaaattctcattggactgtacttcgtgggcctgtacagtgagacatttttcaattgccttctgactgtgcaaaggtacctagtgtttttgcacaagggcaactttttctcagccaggaggagggtgccctgtggcatcattacaagtgtcctggcatgggtaacagccattctggccactttgcctgaatacgtggtttataaacctcagatggaagaccagaaatacaagtgtgcatttagcagaactcccttcctgccagctgatgagacattctggaagcattttctgactttaaaaatgaacatttcggttcttgtcctccccctatttatttttacatttctctatgtgcaaatgagaaaaacactaaggttcagggagcagaggtatagccttttcaagcttgtttttgccataatggtagtcttccttctgatgtgggcgccctacaatattgcatttttcctgtccactttcaaagaacacttctccctgagtgactgcaagagcagctacaatctggacaaaagtgttcacatcactaaactcatcgccaccacccactgctgcatcaaccctctcctgtatgcgtttcttgatgggacatttagcaaatacctctgccgctgtttccatctgcgtagtaacaccccacttcaacccagggggcagtctgcacaaggcacatcgagggaagaacctgaccattccaccgaagtgtaaactagcatccaccaaatgcaagaagaataaacatggattttcatctttctgcattatttcatgtaaattttctacacatttgtatacaaaatcggatacaggaagaaaagggagaggtgagctaacatttgctaagcactgaatttgtctcaggcaccgtgcaaggctctttacaaacgtgagctccttcgcctcctaccacttgtccatagtgtggataggactagtctcatttctctgagaagaaaactaaggcgcggaaatttgtctaagatcacataactaggaagtggcagaactgattctccagccctggtagcatttgctcagagcctacgcttggtccagaacatcaaactccaaaccctggggacaaacgacatgaaataaatgtattttaaaacatctatttaatgtattttaaaataatttgtaagttgattttaaaaccaatttaactacattccaaattatagacagcccatttatatgggagtaacttttcaggctcattgcctcgccggtgatgagaagaactagctagctggaagctgtgggaaaaagaggtaaggtaacttgttctgtcgaagttctctaaattctcttgcttacttgccacacccctaggcccccagcttcccctaacccaaggtttctggtattttctcgtactttatcaagactatggaatcttaggagacttaacaaaagcaaatgagaaattatgtttagaaatgtctaacaaaatgaattctttgtccttttaagtataacacatacctcaggcctcaccagcacataactacaaaaggttgtcccacttcctttctgtggctgagttagtagaacacaggctcccacctgccacatcagcagaaggtcacctcaacatgtgagctacctccccggagaccccccagatccgtaaggatgatgcatccttgatcctaaaaacattttcctgttcctggtgttcagaattggactccacactcactggtctctttataatcttgcttctggccctttgaggcctcaaagctaccagggccttgctgccaggggacaatcaccgctcccggctgagtcctgcagacatagggcctgggctggctgcctcctcctgctggcccagcatcttgcttgcactaaagagagctggaggcttggcactgatgcttgctaaaaacctacccaggccgcccactgctgccgcactgcagggcaccagcccacactcctcccctcctggcatcaggcacacgttcacggcactaaaccttacaggaaagcagtggaaccctgtctttccttcacaggaggcactttccttcctaggcaaaaacgatgatacccatgggcacagcatctcacatagggacacatagagatgtctgactcattaaaacccaagtctctggccaattaaaaggggtccttaatgtcctactcaacagtggtggaaggaaatttgctctatattgatgaaatgaggtggagaaaatctgattttccaaacatgagaattctccatatgccaccccataaccaaagaccccttatttgtgttagatgaaacattcaaagagcctattaggatagcggatgagacccccaagggacatgcttatacaacaataactggctccaaaccacactccatggcagtggctctcaaatgccagctcacatcacaagccctgtgctaaaacacagagttctgggccccatcccggagtttgtggttcaggaggtctggagtgtgacctcagaatatgcatttctaacaaattccccaggggatgcagatactgctgacccaaggccctccttctgagaaccactgttccagggagaagaaactcagctaagtaagggtttggctttgtgctgaagacaatgtggaatttagagttggggtgaattattcaggaaagtagagaggtttggagatgtgagggtgggaagcgcagtggagggaggcagagaggaaatatgaagcagcgtcagttggagagaaattaggaagaggaataaaatgatatatgccagggatttcagttttgctgagcccatgatgacagactcttctctggcaccttatgccactcattgagggcttgtagctggctctgctctttcagagtcataatagggctatgggtctgacctcaaggtgagctggaatgggcacaagtaatagataaaactgcaagaagtcactcaagggtccttcctagaacaaaggatccctacattccaaaggcgaatgccggtcactatcataaaagaaaagaaagaaagaaactgatggtgacattttaaatggcaatttttctagcttctaaaaggttgtggagcaactggaactttcataccctgctggtgggaatgtaaaatggtataatcactttggaaaaattggcagtgtcaccaaaagcaaagcctatacctactatccatttcactcctcagtatttacccaagagaaatgagcatgtatgtccatacaaagatttggacccaaatgttcatgacagccttatttatatagcctcaaactagaaaaagtctgtctatcaacaggtgaatggataaacaaatactggcctgtgtatctaatggaatactgctcatccacaaaaagaaacgagctattgatacacacaggagcatgcacgaaatctcaaaatgctgaatgaaggaggccagattttaattttatttttaattatttatttatttatttatttttgagacagagtctcgctctgtcacccagcctggaatgcaatggtgtgatcttggctgactgcaacctctgcctcctgagttcaagcaattctcatgcctcagcctcccaagtagctgtgactacagtcatgcacaagagcaactgactaatttttgtaattttagtagagacggggttttgccatgttggccagctgctctcacactcctgacctcaggtgatccacctgcctcggcctcctaaagtgctgggattacaggcatgagtcaccgtgcccagccggaagccagatattttttaaaagtacttattttgtgattctatttatataaaattctagaaaatgcaaacaaatccatagcgacagcaaatcagtggttgctggagatgttggaggggagaggagaggaatagattgcaaaggggaacaaggaaattcggggggacagtggatatgtctgctattttgactgtggtgatggtttcattggtatatacatatgtcaaaaacgtaacaagttgtatacgtgatttattatgtgttgactatacctcaaaaaggctattttttaaaatccccctcaggctccaggcactccattacgttggtgtgacttgtcttggaaatatactttgagcatttgccggaggagatccagtgcctgggcctctgtttcttctcccaagtagaattggcagctaaaacgggatgcccatgggcacaacttgtcacccccatcaccgaacagggagcagaaggaggctgctgggggtgcccccacagggagcacagtctcatcgggaatgacctgccatggcaaataaaatcaccagggcaagtcaagggagagaccagggaagagagtgatccagtctatattaaaaaaggatgagaaaggttgaagaaaaagagaagaagggacagaaattctcttcacacatttgcagaagtaggtccggactctccatccacttctcctcctccgataggtaggacaggaatctcagaggaaatggcatcatcttcccatgtttacagacacagcaatgaactcaaagaacaatcttatcaggattttccaaatgaaaacatggagcatatagagaataaagatccataaactcgtatggtggctgagactgaaatggttaatgaaaagcaaaagtgtgtgctgaatgacaccagccacaatggcctgaacacttaagtagtgtaatatacttggaacattgacagctaacaaggtcttcctcccatgtcagaccaagaacacagtttcctaaagataaaaatagcacatgcttttccacttttccataagtgactgcattagaaaactaacaaaccatgaaaagcaaaatatggctagtctcttcaagaaaaactggtgtttctattttgtctgtaaattactttctaatacaaaaaacaattcctgttacattgaggtaattctaactagggacatatgagagagagattgaaatctcatgagctgtctccttttcatctcaattctgtgtactcgtgggtacaaatggaactagtttttgtttgtttgtttgttttttgagatggagtcttgcgctgttgcccaggctggagtgcaaaggtgtgatctcggctcactgcaacctctgcctcctgggttcaagcaattctcctgcctcagcctcctgaatagctgagattacaggcgcctgccaccatgcctgactaattttttttttgtttgtattttttagtagagacagggtttcaccatgttggtcaggctggtctcaaactcctgacctcaggtgatccacccacctcggcctcccaaagtgctgggattacaggcgtgagccactgcacctggcccggaactagttttaaaacaggaaacagttgatatactgaatggaaaaacaatacaatttgaagttgaaaaaacaaaataagatgcccagttaaatttaaatttcagttaagcagctaatagttatttagtataagtacaacccatatacgacaattgcagtatttgttatttatctgaaattcagacttacctgggcatcctagtatcctgttttttgttttgttttgtttttccctttgttttcttttttttccccgaaatctgaccaccttaactttaaggtatttattcatttttaaaaactaaatatttttcggcagtcagaactagagcaaagataaatgatcccaggactctgtttagcaggcagtcaggaagtgtgacagtgtggtgggtggcagccccggccaggcctttcctcttccctaaactgccacagcaggactgccacacttgggaatcccagtttccatctgagcagcccctccagagtttggaaggagtcagtgctttagcctgaggagccgtggatggctctaacactttgcttgtcggttgaataaaaatcaacccaaaggtggcctacactcattgaagtaggaatgccagaacttcagtggtgtcacatagaagaaaatatctaagtgcttagggagatggcagtgctagtggatctactggatcattaagactcactcacccacccagcgcaggtctagaggacacacccttgccacactgggaagtgtaaatgagctccagcatctttatttttttttattttttatttgttttattatactttaagttttagggtacacgtgcacaaagtgcaggtttgttacatatgtatacatgtgccatgttggtgtgctgcacccattaactcgtcatttaacattaggtatatctcctaatgctatccctccccccgcccccggtgtgtgatgtcccccttcctgtgtccatgtgttcttattgttcaattcccacctatgagtgagaacatggggtgtttggttttttgtccttgtgatagtttgctgagaatgatggtttccagcttcatccatgtcccgcatctttaaaaaaaaaaaaaaatctctaagtggtggctcttctctgtagatcaggagctgtagtgagcaatgctacaaaactggagtttctaaatacaggggggatggtgggattctgaggaaggacaggccacgtggtaacacttacaaaagaccaagtgggtgtggttgccactgtggacggtggagccaaagcagtcctcagaatagtctgacccccagaggtctttggcattggctggttgatcatggtgtccctggaattgaaatagaaggacggtctactaaatttttacctgatctgtataagcagaagagttctatctctagtgaacagaagtctaactttagtcaccagaactgagagtcaattcaatcaattcccagatttgacatagtttatagacctagaaccccttgaatgaaaggtaagctggctccccttgaggaaggaccctgttacatttccggcattttattctgataatcttttttcccagccttccccaaagcaacttagggccatttaccagggaaagccatggaggaaaaggaaataattaggctatttggagattccaggacactggctctacgctgacaccagttctaagagacccaaaatatctttgtggtctaccagccaaagtagggcttcatagaggtcaggggtcactagagtttgagctcaggtctgtttcactgtgagtctagagggtccctgaacttatcctatagttattcccccagttccagaatgcagaattgagctgagagcagtggctcatgcttgtagtcccaacactctgggaggcgaaggtgagaggatcacttgagccaagcggtttgagaccagcctgggaaatatagtgagaccccatcttttaaaaagacaaagaaaaataaagaaaattgacatggaaaaataatataaaatgtgaataatctcacatctactaaagaaattcaatctgtaattagaactcctcccacagagaactataagcccagtgcccccatcaactggagaaacagaaagaaacaatcttcttaacagaaagcataattggaatagagatactctgcatcggggaagaatccccatattgattctctgatccatagagtgaaggccaagtggaagcctttggaactccctctacctgccaagatactaaacaaaacaacactgcacgtctggaggaattgtagcaagaacttgaaagatgaaggatgatgatgtccacctctctccattcagctcacctatctggtttgtgcagaagacaaataggtgttggaaaatgacagtggaccagtgtaaacttaatcaggcgggggctccagctgcagctgcaggatcaggtgttgtttcatttctgcagctaatcaacccttctcctggcacctggtgtgcagatggcaatttttcttttctattatctgttagtaaagactatcagaagctgtttattttcagttggcaaggtcagcaatacactccaagggaagagcagtctgtctcagatcttaccgatgcctggggatagggagggagtggccccctcaccgtctccaaggcctagtcctctgctcctgctactggcagcaaatccacgcaggtctgcaacaacctcaattcctgcctcctcagaagaaagaattcaattgagggacgtaagacagaaggagagactgaggcaagttttagcacaggagtaaaagtttatttaaaagctttagaataggaacaaaaggaaggaaagtacacttggaagagggccaagtggacgacttaaaaagcaagtgcgtggtttgaccttttgacttggggttttatacgtcagcatgctttcggggtcttgcgttatttctcccctggttcttcccttggggtgggctgtcccatgtgcctgcctgagcccactggctcaactcctgagatcttatagggaaactactgctcaccagtttcgagtgttttctatctattaggagccggcttttccctgttgccgggtgtgaccaattattactttagaaagacagtcaacaaccgccagaccatcacctgatggtcacctgacactcctggtgtgtggggtatggggagccctctcctgccctgctctttctgactagctacccactataacactcccagagggacctgcacattttgtgctctttgcaagacagtgcctgcccagcacctgtaggcctgctcaccccttcagggtcatgatttttgctttttaccgcaggtacccataagcaaaacatggcattgttcaccatgcttttacattattcacataattttaagttatttacacaacaatgtaaaaccatggtgaaccatgccacatgttgcttatgggtacctgtggtaaaaatcctgctactagctcattttgcagtgtctataatgacaggtaatgctccattcactcctttatgacacttgcaaaaactgagaacataacgcctcccagttaagcaggcatctgggcaatgtgaggagaacagaaatagaccacgctgcatttatctctcttgatgacaggcattgagatttccactttttctggtttcttattatgtctctactgggcattcttacatacatcttgcacgccatggaaagtttctctagggcagtggttcacaaactttttggatacagaatacttttatgtgcttgaaaactgaggaccccatacagctttagtttatgtgggtgtaaggttctagcccaaactgaagtccgaagggagttggtgggtgggtgaggggtagctgaaaaaacacccgaggaatcataggcagtttgaacatggccttatcctctctctgggcacgagccatatgtccagtgtcagcagggtaattataccttttacagacaatagaggctctgaagcaatcacgagctcacgtgagtggtcacctaatgcacctcaagtggcatggttcataatgtgcggagtcgtgtgcctacgctccaaacccactgagtcatggtgcaccaaaaagtggcctcagcctgctcctgactaaagcgcagccatcttccttacactccacccctaggccaggggcatcctccaggtagggacatgtgcccgtagggtggagccctgaatccataatccacagcaacaatacggagagcaacagctcatgactaggattccagctatgctacttatgactatcagggcccagcgtaggccagagcccagggatgtctaccatctctgcagggggtcatcagtaaggctcttgactaccttaatctcctgtgagaccccttgcagggctgctgttatgttctgccaattgtcagggataaaggtacaacattgtgttcctaaaagggcacaggtgcctccttaggcagcagttactatgtctaagaccattcggtttcgcaacaccacctttctgatctgatcaacctcatccattaatgggaagagggccactcaggtgtaattcagagcctgagcagcatgctctgcaagagcagtaacttggcttctacagttgtgacacacactccagggctagtgcctgtcaaggggtaaaaccaccagggtgctcattacacttgcaaaaaccgagagtgtagcacctcccagttatgcaggcatctgggcaatgtgagaacagtggcaggtacatgaggccaccctcaggtataatgtccagtccagtttgcttataggtaaggccaccctgtgtccccacagacccataaactcccagggggcacacagtccatcgaggccccttggtggggccgcgtcttccaccatacctttggtgtggtgacatgtattatgcttacacacactgtgacgggtacccatcccacagtgctattaccccagtgttgctatatgcaccacagtgcctgggccaggggtactgcacgttacctcactagccagccccacccatcataaatgctatgggccagccagggaatggctgtgctgtgggtcttgtggcatcctttgtccaaaacttgccacgttgcgttccaggcatcagccatgggaccccaagtctccagccatgtctggttctctgcagatgctgaatgtatgtgctaaggcaagccatctgcagctgctagaagggcggtgcagatccaacagttggaaacattggtcacttcagtgtaggtgtgggcccagtccacaatgcagttggagcatgttaacctacagttggaatgacagagtaggcataggtactaacagaggaaaatcacatccctcaggtaaaatacaggctaacctttcatccctggataacaatgcagcccccaaggggttctgccctgggcaatagtaccacaccttttcagctccccatggttcctttgggtcctgtattcatgcgaaagtcacaggggagcttgtagtaggccacacagacagtacatttgaaccctggaggaaagtttcttccctggccgttttcctacaaacagttaacttcggggaccattcattgaacacccaaagagtgacatacaagtcatactgtaggccctccccacagggagctacgatggacaaccaccagcagccgggggcttggaggggctatggccacagccaggttttctgttcccctgccttcagggacgttggggcaggcaacaacaggttactgttcatccccatacctggtcagaggcggttacccttggtgtgtatctgcaactgaataggggtggtggcccatgtaacaaagcctccacctgggctgggctgcttttccatggccattcattcaaggtttggagcatcaggtccagcctggaacttcagccctgcaaagacaggagtgtgacatgcaagtaaaacccattcttcaagagctcgctatatcactcaatcatacccacagcttgcaagttgtgcggtacatggaatccctactttatgtccattgttgtgcctgttgtccagtaaaatgtgtcccccatcactctcaatgaccaaagggcaaccatatagagcacataagtgttgcagggtctggatggtgtgctgttggttggccaccctgcaaggataggcaaacaacaggcctgtggctgtgtccacagctgttagcgcatgagtatacccttgtgacttcggcagcagcccaatgtagtctacttgccacctggtcaagggcacttgccctgttgtcacttgtgtagcactggacagctgcctccatttagggtatgcctgagcacatgccgggcatttctgacaagcctcccaaatgtcttgcatgggcagagacagaccccaacatttattgacttgttgcatcagtttaccccctgcatgtcccagtttccggtgtagctacaaggccacatctcatgtagatgccaactctaaccatcggaccttggccaaggcttctgcctcgtcattgctgggggtggccagaggcatatggcctgacaaatgataaatagttacatctttgcaatgacccatttcccagaggtcttgctacatgggttggtggccccaaatgggttggtggccaactagccaattctgtattttccaagtagttaaacacaaagttaggcctccatagactgcccagctatcggtacggattaccataggtgtctccgccttgttgatcaccatccatactgctttaaattcagcccattgactactttgtccacatctggtttcaaaccatatggttttggtactaagttggactgcaacactggtccaagcaggagtagcacctcgactagacccatctgtgtgccatgccccatcaggaatagagggatgcccttccttaaatggcagtggctcagggtcaaggggtgcctcaggccccatggccttctcttgcattaggactgcaggtcccaagacctcttgcaactctgctgctaatgggcttgtgctcagcgtactctgttgctccaagtaagtgcctcactttgccaaagtggatgtctgcaccatcccagtctggggggtcattacacatgaatgcacccatcccgctgtcaggtaagtcatccacactgtgactgtagcccatcctatcacttctcacaagcctgaagggcagcatatacagctgctagctatttctctatcaaggaataccagagctcagctcctttccatagttgggaccaaaagcctcctggcattctcaggcactctgtgtgctgccacaggcccaaactaaaaccatctgtggtcacatgcatatccagttcaaatgggcaccccttgtcaaatacccacagggctcgtgcctgctgaatagcccacttggctgccaggaagccagtctcagccacatcagcccaatcccagattgctcccttctttgttaactgatacaatggttttatcatttgagctaaatgaggcaggaatgtccaccaatatcccaggaggctcacaaaagtttgcagctgcctcaccgtggtgggccagggatatgcctaaattttgtcaatgatagcctcttgtatggccttcatcttacccgaccagataactcccaagaatttagcaggtaatccaggccctcggaccttggatttgttgatggcccaactgcatgctgccaaatgttgccacaagaggggtgccactgcttctaaatctgcaagagaatcagaggttaacataatatcatcaacgtaatggaacaagtggactccctttggacattttcaggctgttaaatccatggcaacaagaccatgacatatggtggagctatgcacatagccctgcagcaacactgtgaaagtccattgtcatcaaggcaaactgttcctggctctctagagcaaggtcaactgagaagaatgcattggccaagtccaccacatagtggtactgtcctaattccattgtcgagtggttcatcaaatccatgatagatggcacagcttccaagccatgtaaaatatccacctccagaatgtattcaggtatgggagagacatacacagtgtataagcaaggagccaagtggccaatgccaaggtacagagatacaggtttcactttcactgactggcctccgtaacctttaatatatgcagatttgcccaaaaacttaactgggttcccataaacaaggctacaatctatgccagtatctaccagcaccagcacccactgtacattggtgggggaccagtggattgccaattccacatgtggcctctggtcatctggtgtccccccaagccagacacctttggccagttccctagttgaacagaaaaggctctacatttccacctggctgcagcaagtagtctctgagctgggtaggaccaggtcacacagcaatgcctttctcccctttgggcattttccggaattgctgccctgcatacaactgtctccgcaaagttaggagtatttcattgggctgcttatcaattttctctcagtcaaccccagccaaaatcaaatctatccacatctgtgagcgtgtcactcgttggggccccctttttttatgggggagccccctgtgggtggggtaacttccccttctttatggtgtggaccctccaatccccctgaaggccttctgcttccctgagagccgccatggcagtggttacttcatgtatgcggtgccctacgtatggggtgaggacagcagctagggagccaaaggggctcaggagcatcaaacccaacatgagatccctcatgtgggaggtgaaacatttatcatctggccctcaggtattcaggacaaacatagcctgccgcatacccatctcccgaatgacttacaccaaattggcatatgactgccatttactcacagttttgggcatttcaccagcattattccacacagttcatatggctgcctgtagccactcagtcagggtgtggtctccttgcgctgccactaaccacctgctcacttgcagccgctgacagagagaggggtgagtcatggtggaggccagcttgtccatctcagaggtggaatgggagataccatctgctcccttgttccacagacgaagcatccaggcaggcaggggttcccctggacactggcaacactgcttgcctaattcctgcaactcagttggggtacaggcaatatacgaaatgtgttgcattatggtggggagtccctgagtccacccttggagccccagtggctgttcatgatctaccttctgtcagaccaccgggtgagcccgcaacaggggttcttcctccttggtatgaaactgagtggggatctccagacaagatgatggacccaggcctgcattcatggtagcctctaattccttttccaagctctgaagccacacctccaggcatcctgcctgcacctggaggtccccattcatggcagcctctaattattttccagatcggtgtagccagacctccagtctgcatccctcagggactgggtgtgtacttttcttagcacagttaaaaatgcccatccaactctgccagcaaaggctctctccttcttggtgctctgcacttccagctgcttcagcgccttctccatgctcatgggggacccatctactgccacccaggtttccactcaagcccaccctcacagcacggctaccaccgggtaccacaacccatgttgtggtcacatggccaacctggaatcagcagggaccgaaggctcacttaccttaggatcctgttcgtgatgccaattgtcaggttctagcccaaactaaagtccaaggggagttggtgggtgggtggcaggtaactggaaaaacactcgagtaggcggtttcgacatggctttattctctctctgggtgcaagccatatgtagtgtcagcagggtaattttaccttttacagacaatagtggctttgagccaagcacgtgctcatatgagtggtcacctaatgcacctcacatggcatggttacataatgtgtggagttgtgtgcctgcctccaaacccactgagtcatgctgcaccagaaggctgcctcggcctactcctgactaaagcacaaccatctcccttagagtgggctaaatctactgctatttatactattagaaattttaacacagaagttttaaatatttacattgttaattgattttgaaataataagcccattacaggttaacataattaacatacttttattaaaaatatctgtattttttaaaagaaaaaaaattagcaacaacagtgatccttggaatcgtcccacctcagcctcccaagtagctgagaccacaggcgcacatcaccatgcgagctaatttctatattttttggtagagatgggatcttgccatgctggccagggtggtctcgagctcctaagctcaagtgatcctcctgcctcggtctcccaaagtgctgagattacaggtgtgagccaccacttctggccagaagctggattctctgtcttgttctccatccaatctgttagactgtcaaatgccaaataacctttggaaaattctactcgtaaaataaggagagagataaataacttctgagtatcatcattaaaatagtttgacctcatggacccactgggtcccatgtggagaatagctctaagctaaagagtagaatggctgggaggggacataaacattcagcccatagctgctgaccacaataacacattttaagtctcttcctctcctgctccttgtgattgcagacagactcaatctgtaggagagctgtagagagaacaagctcaagcccctgattttgcctacaaagaaagctgagcccagcaaagttaagggacttacccaaggtcacacagccacacagcagagctggggctgagctccaggtgtcctgctacagaggccacttctttctcccactagggactggcctgtgattacttcagaaaacaatggtcagctaactgattctgaacgccctttgctggtaaaagctaatctcctgaggaaaaatgtatgcattggctgggcgcagtggctcaagcctataattccagcattttgggaggtggagacaggtggatcacttgaggtcaggagtttaagaccagcctggcagtcatggtgaaaccccgtctctactaaaactacaaatattaagctcggcatggtggcaggcacctgtaatcccagctactggagagactgaggcaggagaatcgcttgaacccaggaggcggaggttgcagtgagccgaggtcgcaccactgcattccatcctgggcaacagagtgagattctgtctcaaaaaataataatagtaaaataaaaataaataaacaaataagtatgcatcacctcaggtggtcagtcagctttcccaagaccccaaagcacacaatgttctttctggtatgagtgacatggggttcacagcaccacaaagtccatgacttttccctcagaagtgaatgcatggctaattattttgtattttttgtagacatggagttttgccatgttgcccacgctgctctcaaattcctggactcaagtaatccacccacctcagcttcccaaggtgctgggattacaggcatgagacaccgcatggcctgcacctatagtcccagctatcaggaggctgaggtgggaggatcacctgaaccggggaagttgaacctgcagtgaactgtgatcgctccggtgcactccatcctgggcaacagagtgagatcctgcctcaaaaaaaaaaaaaaagtgaacacacatgctggggaagaggcctgcaggcacccctgccagttctgcaccagagcacactgtagcagccctgctgtgatgcaggaagcagctccaggtcctgcagtctgaagcatggagcctgaagcctggagccccccatccaatgctgcgccatgctcaccagtatcccccagcatcagcaccgaggcaccagctgcagataaatttctcacctaaaatgttgagagatgttgctaaactgtccttctaagggtatgtataataatacggtcctgccgatactgaataagactatctgtttcattacatcctcacaatactgaatatcattagcaacttgaattttaaattgtgctaatcaatgaaaatgattgcctaattactagtgagttgaggttatttaacattaatactccttctgatgaaatattttgcatttatcacattttacataaattctctctatataattagcactagaatgtccgacttggttttcattgttcctcacctgtttggaaacacattaagaatgagggagagaatggatggggactcacctagggatgcatggagctggtcggcagccactctgaggccctcttaacacttccccaccacacacttaatttcccctggtttgtccatagatacatccaacaatttttatgtaaataagaaagactcagctttcaatggaaaatggtaggttggattttatgactgaagtggcaaaaagaaataagggattttattatgggggaggtccaaaccctggtgaaaaacgaaattcattgaaattgtttgaaaattcaaggattaaatcagattattttggattcagtaggaattagattactttaaagccccaggatactttattctgtagaatgcatggaaagtatagaaaagagaaacaaagagggaaagtcatggctaataacctggaaggggtaaatagggagccaaaggcctgtgggacgtaaccaactcagcattccactggaggctttatgatcaaatagcaagctatttatcatgaatgcaggatgtgggcaaactcacgactgctcccactgccagaaggtttgctgagggcaatcacttcctggcaccgagctccttgaggttatctactgggacatctggagaatgcagtcttgcaagcctactctggacccagcagctgaccccttcttccatgcccctcttcctgctatctcttttgcctaataaatatggagggctgtgtaaagctcagggcccttgtccactagaggcaaactgcccgctgaccccttcttccaaatatgctcttttgtctcatgtcttttattcccgctttcaccccactttgttcagtccccctagggccgtgtgggttacatagtggcgccctgaacagcgacagaatcaggtgctctacaagtggcgtccgaacacagggactatgaggatgtgaatgaagaagatctgctggagcagaggaattgaaattgacaaggtgaatggggatcccgggacaagtctgccggcagcagatataaggtcagtgccctaaagaggtactgggagcagtgccttaaagtagtactgggaatgggaagttttctgaatcagggtaacatggggcagaattggtctgttgaagaaaaacattatgtgcagttgcttaaagttttgttgaaacaaactggtgctcaggttagttctcacattaactacgatgctacaggaagtcattatgcataacccatggtttccacaggcagggactcttgatgtagaaaattgggatagagcagaaggattaaaacaggctcatcaaaaaggttttcaagttgattcttcagttttctccacttggagtttagttcgtactgtacttctgccattatctccttgttattctgcgggacagcaggctgaatgtaaaaatctgaaagaatctgttgtcccacccacagctccagttgaaaataagtaataggagagggaggataaaaattggcctataccgccccctccagttgcagaaacatctgtaccgcctccttcggtggcagaaacagagaccccaatacaaagaattttacgctctgccgccacggctggagagcccttaggaccttgcacttttcctatttccgtaagtcctgatccaaataatccacagcagcttaatcatgaacacattccactagagtttaagttgttaaaggaattaaaagtgagtgtggtaaataatggcatacagagcccattcactttaggattgctagaatctatgtttggtgctatgtgtcttttaccctttgatgtgaaacacttggcatgaacttgcttgtctgctagcgcatatctgacatggaatttaaactggcaagaacagggtgcagaccaggctagacagaaccatgctgctggaaatggagacattacagaggataggctattgggtaatggcccttattctgacctggtacatcaactagcactcacaaatgctgcttatcagcagtgcacacaggctgctaaatgtgcctgggccataattcctgaagagggagtcccagtactatcatttttacatatcatgcaagggtcacaggaaccctacgcacaatttcttgcaagattacaagaggcagtgaggcatcagattcctcataccttggctgcagaaatgctaacctttactctagcttttgagaatgcaaatgcagattgtaaatgtgcactggcaccggttaggtgtacaaaaacttgggaaattttctcagagcttgttaagatgtagcaactgagctttatcgatctgcaatgttagctgaagcaatggctaatttagctgttgacaaatctaaaaagagccaagggtcaaaccctaaaatgggaaaatgttataattgtggaaaaactggacattttaaaaaggaacgccaccagatctcaggacagaaaggatcttacaatgcttttccccccggcccccagcggaaagaacacctggactttgtcctcgctatgacaaaggaaataactcggctaatcagtgctgctcaaaatttcatcagaatggcacccccctgttgggaaatgagatgggggcctgtacccgggcctcacaaacaatgagggcattcccaattcagacctcaaccctgtttcaggcatgggttcccagaggcatattgagtccctcacccgaggaactccaggaagtgcaggattagatctcccagccagagaaagggttacataaggtggggaagacaaacccaccaagattctcactggcatttggggacctttaccagcaggatatatgggactaattttaggcaaaagccaccttaacttgcaaaggcattactgtagtcccagaagttgttgactctgattatgaaggagaaattcaagtagttttattgtcacgagatcttcgggtttttgaaccgagagaatacataatgcaattattacttattccctgcaaattacacccttctccatgaaaggagaaacaaggaaataaagggtttgggagcacagctacacgggaaatctatctatcccgacccatagcctctaatagacccacctgtgtagtacaaattaaaggaaagaaattttatgggtttatggataccggagctgatgtgtcagtgttaccagcaggtctttgttcttagagctcccaagatggcggcaagccttttgttctctgacctggagttcttggcctcacagattccaaggaatggatccttgggccatgcagtgagtgtcatagctctattagaagctcttccaaaagtcgtgctgctatctatggactaaaacatactcaaacaataatgacctctggcgtttaggctcaatgctcagagctaattgcagtcattcaggttttacagctcacagcttcagatcctgtcaacattgtctgtgttcagtttatgtcgtaaatgtagccggtcacatagaaactgctacaattaaaagtacgctaaacccagaactgctaatttatttttaagacttcaacaagttatttgttctagtgcagctccttttcatatttctcatattccttctcacacacaacttcctgggccgctatctctaagtaatgagaaaacagacaaactgattgcctctgtgtttcagcaagctcaaccatctcatgtgcttctgcaccaaaatacttccgcccttactcacatgttcctacaggtttgtattatattatgcagtatatccctcgagccacacctatagaaggatgtaatccacgaggtttggctccaaatgaaatctggcaaatggatgttacacacacagcaacctttgataagctgagctatgttcatgtgactatagacacttattctcatatgctgcctgctacatgccaaacaggtgagacagctggtcatgtacagcgacactgtctgtcatcatttgctcatatggggatatctaaacaattaaaaactgacaatggacccgcttatactagtcatgcttttaaaaatttcttgcagctttgggctataacccataaaacaggaattccttataatcctagaggacaaggcattatagagcaggcacatcaaacattacaatgcatgttgaaaagacaaaaagcgggtataggaggccaactaccacctcaataaaaactacatttagccttatttactttaaattttttgactcctggtatggatggtaagactccagcagaaagacattggcaagtgttagaagaaaagaggaaaatttatccaaaagtgttatggaaatccctggaagaaggaaaatggaaaggtctggtggatttactgacgtggggaagagagtatgcttgtgtttttacaggagatggacaagccgtgtgggtgccctcaaggtgtgtgcaaccatggaacgggagactagaggaacccagggtggccaaccatggacagggtccccccggtacgagccatgagccagctgagcctgagtgcaaagacggagagaaggccaactggagtcacaacacagttctaatgttatatttgtaaagaatatcactactcaacttacagtttgtgtttatagatatagatatagatatagatatagatatggatatagatatagatatagttatagatatagatagatatacactttaagttctagggtacatgtgcacaacttgcaggtttgttacataggtatacatgtgccatgttggtttgctgcacccatcaactcatcatttacattaggtatttctcctaatgctctccctcccccagcaccgcctcccaacaggccctggtatgtgatgttccctgccctgtgtccaagtgttctcattgttcaatttccacctatgaatgagaacatgcagtgttttattttctgttcctgtattagtttgctgagaatgatggtttccagcttcatccatgtccctgcaaaggacatgaactcatccttttttatggctgcatagtattccatggtgtatccttatgtctttttgacagctaagaaggaccagctccaggtaaacaatacccaattgacctgtaaatcttaccaattatatcactgcattaatcatagcacattgcaaacacataatatctctactttgatgattttaggccacatccctgggctatgtattcctgttaatctgtccgaggcttgggctgccacacctgctttgcattttgtgaaacttcttctaactgagcttactcatcatgtctgtagagccttagacataataattttagctattgtttccttggtcgcactaataacttctgttgtgatgtcctctgtagctttgcataattctattcaaacagctcagtacatggagaactggacacacacagccgaccaagcatggctacttcagaataaaattaacactgagttacaaactgaagtggtgttatgggaagtcagggaccccaaagagagggaccagctggagccacagcagaggaacgtaaattgtgaagatttcatcttaatacggatatttatcagttctcaaataatacttttacaatttcttatgcctgtctttaatctcttaatcctgttaccttcgtaagctgaggatgtgcatcacctcaggaccactgttataattgtgttaactgtacaaattgattgtaaaacgtgtgtttgaacaatatgaaatcagtgcaccttgaaaaagaacagaataacggtgatttttatggaacaagggaagacaaccataaggtctgactgcctgcagggtcgggcaaaaagagccatatttttctttttgcagagagcctataaatgaatgtgcaagtaggaaacatatcgctaaattcttttcctagcaaggaatattaatattaataccctcggaaaagaatgcattcctgaggggaggtctataaatggccgctctgggaatgtctgtcttgtgcagttgagataaggactgagatacgccctggtctcctgcagaaccctcaggcttactagagtggggaaaaactctgctgtagtaaatttttggtcagaccagttttctgctctcaaaccctgttttctgttaagatgtttatcaagacaatacgtgcaccactgaacatagacccttatcaggagtttatgatttttctcctgtcctgtttcctcaggagcatgtgatctttgttctcctttttgccctttgaagcatgtgatctttgtgacctactccctgttcttacaccccctccccttttgaaatccttaataaaaacctgctggttttgcggctcaggtgggcatcacggtcctaccaatatgtgatgtcacccctggaggcccagctgtaaaattcttctctttgtactctttctctttatttctcagccagccgacacttatggaaaatagaacgaacctacgtgaaatattgggggtgggttcccccgatatgtgatgtcacccctggtggcccagctgtaaaattcctctctttgtactgtctctctttatttctcagctggccaacacttatggaaaatagaaggaacctatgttgaaatactgagggtgggttctcccaataaagtggtaatgttgaaatccacagttctatggttaggggaaaagcacaaagcttgcaattgcagcagcaattgcattgtcattttaatcacactcatatttgtgtaaccaacttagaatataaccaaagtgagtatctgtgggacgttgtgaaagcccatttgcagggagctttcacatctaacatcacctttgatattggtgaattacaaaacaaaattcttgatttacataggcaaattcaagagtttctgccttctttagaagactggaccaaattccagcaaggcctggagagcctcaatccttggacttatctaaggcactacattaacatcttacatgtagttcttggaataatattgttttgtctctgtcttctgttcatagcctgtaaaattggatggaccaccaatcggaaaatgagagctgcccaccctggccttacattctttcaattaattcataaacagaaagggggatatttagggagcctaaggctcgtgggactgaccaactcatcattccactggaggctatatgataaaacagcaaactgtttatcatgaatgcaggatgtgggcaaactcacgactgctcccactgccagaaggtttgctgagggcaatcacttcctggcaccaggctccttgaggttatctactgggacatctggagaatgcagtcttgcaagcctactgtggactgagcagctgatcccttcttccacgccccccttctcactatctcttttgtctaatcactacggagggttgtgtaaagctcagggcccttgtccactagaggcaaagtgccccctgaccgcttcttccaaatatactcttttgtctcttgtcttttattcccacgtttgccccctttgttcagtttccctaggtccatgtgggttacatagtggcaacctgaacaatgacagaatcaggtgctctacagaaataactttttaaggaaagatttgggacttagagaccccaggagacatacacaaaaatgataagaggatgtgcccaaaccagtcttaaagttgtggcacagggtgaggaagatgaagctgttactgaacctcagagagtgactggtgttacagcaaaagttagcaatggcctgaagggagggtttctgaaatcaaatatgaatgattccccctcagggaacccaaccttgggaactactgcatggttctctgtatgggaaaatatcattaatgcaggataaattgtgaaatatcacaggaagcatcctgcatctagtcaatcttctgtttctggggtggcctgtgcagctgtgcaggcagaggcccaaccatcctggtgagtggcacacagggactgagatccagccacacctaccaggccatgctctgggaagggggtgggacctgggcaaaggacacctctctaggactgcacagaagcctttgtgggtgggtgggacattcctgtgatggccttctggctgggcactatgaaatgctctgaagatttttccttgcactgttgcactaaccccagtcctctatcactgccccttcctcctgggcgacttcactgatgttgtggccatgtgaattctctggccaatgaaatgataaagatgatatggcctctgccaagcagacactgtaagtattattgtatgatgcttttgtctctttttttaaagttaaagcagtttattaagaaaataaaggaataaaagaatagcactccataggcagagcagctgcctctgtctcttatattttcccctctgcctcaagcccaacatgcccaaaattggggctgctggttcagcctgggtctcagaataaagacatgagccacagatccattgctgacccatgatggagatggacacaagagagaaacacatttttgtcatgttagccactaagattttgatttggaggccatttgctacagcaatataacctagcgtgaacagagagacacagcgatgttccatttcttttcaacctggaacaggagaatttcataggtgggcctcaatttcactttagtatcttatttagacaagaaagttcatactgttcaaatgtcatgtttaagagtgctggcattatcactgctgtggctaccccatcagatgttgctcactgactaatcttctcatgttagtgaggatggacaacatatcaggccataattcaaagtagcaaataggaaaagagcttcatcctagcattatgggaccttaattaatgtcctttcctgacaggtttcagaggcttttgcaggcagcagcagagctattcatctcactgacagtggggaacatggccaaatggttgcccccacaatggaggcagagtttcaggacacttgtctgatctctgcccttgaaggaacagtctcaccctgattgacacttttgcctgttatgtccaaagaaccaatggaaaagcaggaaaattattccttcttcatttctctcttcattatttaaaattattctgtcttcacttctctctccttttctctgcttcctacttagctctttagaaatgcaattataatcttttatctccccttcaccagacactcccaacagggcaagttcatctaactatgtgctcttagttagacgctacagagcagaactctctcccaccaagagactaccttgagacataacagtcaattcacaagccaaaatatgcccgctatgaaactctcccatctggaaattttttggctgcttttacaacctagttttgcccacaaaggcaccagcagtaaccaactcaactgcctggtagacaaggcaccaaagccagtacccagaccctctacctgctcacttcctgccttgcatgccacgccccccatttaaaagcctctgctttctgctccaaaggtgaagcagttacccttaaggaaagaagcctgtacttcttcccctaaggtagctttggaataaaagtcactttataccaaacctagctcttgttaattagactctgcaagtgatgagcaactgaacctacatttcagttataattcctatgcttgttcttcctgccctgccttggggacacgcacacactcccaggcacatacatgcacgtgcactgagacagctatgtgaataaccaacaagatccccttaggaaaaccggtgcttggcctggccttaaattccagacccttgggcatcatacccaagactgcaagaaagaggaggggctggacctgaaaaacttggaagggaaggtccaactgtacaggtattttgtcaggcatgtgatttcagtataaaattctagaaaagatgagtgacactttataaggagagaatatcaacaaaatttctcattttacttcttgctaagacgacagcagggaattgtaagcagatggatgggcaatccccaccttcagcaggggaggccaaggccccaacacacctggggagaagagctgggggcagtgaatggctgaggctttcttggggagctgggccatcttcttcggttttacttcctgaggaattcacaggcttccaggagggctgtgggacacaacagagcaagagattcagaaactgatttcttccattaaaccagttatttaatccaataaatcaaagagaatactaagagttttctctgcccttctcccatcactgagtcagtgcttgccacactcatattcccactcccctactcctagcgactacggtgttcaagggagccagagtctagccctcaccagccagggtgtttccctgctctggcctgagagacacaaccaccctgcacttgtctctgattgaatcgactgtcacattctcaagttcacaagacattggtggtcctctagcttctcccggaatgtgaacctgtttgcaatcatgttcacctgcagattcactcattcattcacagatccttactgagcacctgctttgtgtgagttgctgtgctaagtgctggggacacagcatggatagactggcctgccctcaagaagcatgtggtctatgcagtcctgagctggctgctcacaagaagagccctgtagccatatttctcagagggtggtcctgacctgcatcacagtgacctgagttgtttgtcaatacagaaaagggtttctcaaccttggcactattgacatttggggcctgataataaccctttattgcagggggctggctgtgctttgtttagtagcatccctggcctctacctatttgttaccagcagcaccctctatgttgtaagaatcaaaaaaatgcttctcacattgtcaaatatcccctcaggggaaaaattgtctctcattgaaaactaccgataaagacatttctggccctgcccccatccttggaccaacagcatccctaatgcccccaactctgggtgagggaccaggaataggaatctgaatgattgcagtgcacagggagctgtgcacactgaaatcccacagttatcaccgggagccttacaatactctgtgatgtcttctaaatatttttaagggattaaattaatatcaacatatttccctggttaagatgtgttttcctacacttgaatttttttgagattttgttttctctatagttggcatctatggtaactgtctagaatcagatttttttttttttttttttgaggaagggtctttcggtgtcacctaggctgtagtgcagtggtacaatcatagctcactgcagcttcaaccttctgggatcaagcaatcctcctatttcagcctctcaagtagctgggactagaggtgcttgacaccacaccaggctaatttttaaaattatttttgtagaacaaggtctctctgtgttggccacattggtctcaaactcccgggctcaagccatcctcccacctctgcttcccaaggtggtgggatgacaggtgtgagccatcacacctggctggttttgtcatttctcaatgcatatgtatatatgcacctttcattttactgaataaaatggattatcagtttccaaagatttcatgacagtgccgtcactatccgtactataaaatttataaaaatttattacatactgctctattttattctctaattattttatcaatgagattataatttcctgaactgtaaagagatattatctttccttaacatttttacacctgtgttcgttcctagaatgctgtttggccctcaaaccttgaccttcacccatggtggtttctcggggatgctagctagggtctacttacgggaggttgagcactttttcagattagtaatgcctgcgacatactgtggtcccaaatatttttcatatgttgttttgccatggagtctggccagacactcagtgttgtcattgaacagaaggtttttggtttcagactggaataagcaaaacttgtccgggcagtcagatccatttctcccaaatttagcctgcgacaaaagggcagacagtgagtagctaaggaaaagaggaatttgtgggttaaaggaggcaaaggggtatttcttccacccaagaacagccctgagaaaaccatggggcagaaggagctgagttctggagtcattccacctccttagtggagtcccccaccccacactcctggtggcaggcccgccttgggcagcatccaggcctcacaccacttctggtcctacctcctaccatctgccatctttccttccttcttaacctgtgaccttttcccatacaacttcttatgggtgacaaggcaacaatggaggggttttgagatctgccctcacaagtcaattgctcaggacattctaatatgcagctcttctagagaggcaggctgctaggaaaacccaggctcagccactaaccagctcagtgtgcaggtcggtcaccctgcctccctcacacagttcctgctctgtcccaggctcccatgtggggagactgagacccaaacccctcagtcacggcagctctctcaccagcaccactgtgtgtgcacattaagagctccataaaggccagttatggtggccagtcttgttattcctgagttgttttcttcaaaagcacacagagacatgatgttatatgataaaaatagaagttctaataaaatcccagattttaagaaaattttgggatttcgttcaaatcacatttagagagccctaaatctatagggcaccttctgagtttgctgttttagaggcctggtctagagcactgttcactcggcccaggttcaggaaatgtcacctgagtaaaaagcactatactaatgcatgtgggaggaaggctcagtggcttcctcatttgccagaagaacagcaggagggaaaaagacagcctctgagccaggcagtgatggcaacaaggccagggcacagagtctcagcagaaatggagtgagtcccagaaagcccagagtcaaaagcctctgttgttcttgttgacactctgggcaacgccacagcatgaagccaatactctcaccatgagcttcaagtagaggactagagaggatcgagtgggctggtgcacctagctctgtgatctcctcacctaacatgagcccacacagctaagaaagcactagaagccctgtggtccatacctgttggtggagcaacacctgtttcaggcgttccaccttatccatccgagacaccacggcatgattcggggccatggcaagatggcagcttctagcctcagtcacaggcttccgtttgccatcgaggcacagcagcgcaaagtctgccagcttcaaatccttagcccatgcgtcattgttatttcctggggagaaaaagaaggtggcatcatccacgcctcccctgcttagccaagaagtctcttctgggtgggtgtggccattccactgacctcccaaatgcacacactggggttgtggtgatgtgaggaacagagaaggagcttcatcctacacaagctgtacaaacttcaaatataccaaatattagtgctgtgtccatgcaatggaatgttattcagcaataaaagggagtgaagttctggtacatcctgcaatatgcatgaacctcgaaaacgatgctaagtgaaagaagccagtcacaaaagaccacacaataggctgggcacggtggctcatgcctgtaatcccagccctttggaggccaaggtgggagaatcacttgaagctaggagttcatgaccagcttgggcaacatagcaagacctcatctcaaaaaaaaaaacccaccacatattatatgactccatttatatgaaatgtccagaataggccagcctatggagacagaaagtggattgatggttgccaatgctgaagaaggatagggcaatgactgataataggtgcaagggtttctttatgggaggatacaagcgttctagagttggattgtgttgatggctgcacaactctgtgaatgtgctggagatcactgaattgtacactttgcatgggtggattttttagtatatgaattctacctcaataaagctgtttagagttcttatttttttaaagaagaaaaccctccacctatgccatatttttcagtgagttccagaaaaagaatagatggtttacattcaaggagaaattggtttctcctccctttcatattcaaatgctattagtgtaaccagagaaaggaaaggaacttttataggtttatcaaatatatacagccaattctaacaaaatacagttgtaaagtaccggagaaagttaaaattaaatttgacatcaatctgatccctggagattacttcagttaatggcttgtaaattctaaatgtaattgtatgcatgtctatgtttgtgcagatgccggctcattgttccggctcccgtttgtctctctgctctctccctttaagaaagcactttattcattctcttggattcctctatttgatattgaaataatttcaaatttacatgtcttgttttaatctctgtcccaagagacactagaaggagcagaagcagaagggagaagtggctgagactgcagtgattactgaaggagggaggccgaaagtggagacagttctttctcaggaaacagaatagcaagtcacctgctgagacttgggggttggaatgctgaagtggggctaaggagacagatgcagattggaaggtagcaaatggctgaggaccaggagagagagtgattgttcaaacattggctggaagattatcttccatcatctgcaaccacctgtaattttgttcccactaactcccaaggagtctccagaccaaggctcacatggggatgaatgaaggcctctacttcctttttcataaagggaggcttcatttgcatatgttcacccagtttgtagcatcatccacagtttccaataggcatgcatgatctcatgtgggcagacagtgtgtttctgtggttgactagaggaagccagggagacatttgctactgagcatggctagtatctgtgtgtgtgagagtgagtgtgtgtgtgtgtgtgtgagagaaagagagagagtgtgtgtgtatgaatttcgtttcaaaatccatatgacacctacagatgttatcatgttgtctattgagataaagaattttggagttcttttaatcacaaatatggaaaatgttataaaaccttcccaaaggcaaatctgaacactaagatgtgttgtgatgccaaagactctgctttgaaggagaaaaggaaacaccttcacctaccatcagtgttctgcaagacagtgacatctttcacaaatgcaacgtctccagcattctcagccaggcacctaaaatgttccagaaaatatacacataattacagaagagaaactagtggggctttcataaatatttgtaatatgcattccaaaaactgaaatatggaagtaaacatctaaaagacaactatttctaggaatttactgtttacagcggcagattgaacacaggtgtacctgccctccttttaaaaccctatataaaagacattacaaaaccaagaaatctaaagatatgcgacccaggaaacaggcaatctaacatgaagtaagacaaaggaaagcaccaaaataatggtcaacaggacccccaggaccacagatgtgcaggcggcctacacagcaaccagtccaaactgcagcaggaagatggatgccttctggagcagcacttccaagtaaatgatgaaactgtgatagcacccagagagagagagagagagagagagagagagagtgtgtgtgtgtgtgtgtgtgtgtgtgtgtgtgtgtgtgtgtgtgtgtgtatgcatgttgttaggagatttacattactggcagacagtttggggatgagatagtgatgtgtttttttaagtgcagaaaattaagcaaataagaaaagacatttatgaactccagagtaaacaaaaagtttgtacaataagggaaatataatatgagaataacgcttacacagtcataagtactgaatatgacattagcgtgttgggtgctgaagagagttgaagtctgtggttgtgtggtggaaaaggtgctgggggcagtgtgagaggctagatcttcttctatactacagagtcagcagaaagttaaaaattaagaaccagcattataaggatgatagaaataaaggggtatgacactggtttcagcttttaatgattttgctataaatttccccaatctagattctagatataatttaaacaaaagacaagggattttcttccagtataattaggaatattaaaatgtgggtgtttccagtgaactaataccttgctgcaggtctgaaaaaaaaaaaaagaggagcacatgcttctttcgggctcttatgagacatgtgttcagcatttctgagtagaatcacatttccatttgcaaatccttagtcccttaaagatatttttatacattcacaaaacatttttttttgttttgggtctttttttatgagccacttatatagcaaaagctacttttctgtcattccattactggaacaaggctgttgaatttatattaaaaagttcagacaccctcagacacatgacgccatctggtcgtgaaatgtactcttggcaaatggaggaaaaggaacaggggaagatcctctctgcacccttcacactggtaaatagtgcccctgagaagcaacacccggatgaatggtgctgtaaaacgtggggtgtggttacaagtcactaagtggttataacttatgaattctgaaaacttgttttttggcttatttttcacttcgttactggagaataacactgcaattctgccatctctttgccatttctaaggccaaagtcagagaaaaagggaaacctaagccatagtcatgacctaggtgagaagaaaaggggcggcgatgggaaagagaattcttccccataaatggaattgtaggaagcacttaggataccacactctacccatttgattttcaggacgaggctattgaggcctactgctgttgatcttggctcaaagccacagggagaagcactgcggagctgaggtcagacagccctggtgccagcctccactctctggggcggtgggtgtggtggggacagccctcactggggccacccatgagctgacccacaggatgacccccactctgctgtgacaggtcacatctggctccttagaactgcaatgctgacatgctgagggatgaggtaagtccccatcctgatggagctcagtcacagactcaccggaaagccccagtgtagccgtagtatctctcgttgctgttgggcacgcacttattctcaccctgctcgtcgccaatacacagagcacagagattagatctcgggtcagacccaggggcacagctttgactgaaatattcatctggagagaaggaacacggggagtcagctcttcaaacctgagtccacacaagcaacctttacctaacagccgatgcagggtggtttcagttcattagacttcccaggacagcaatctagatagaacacactcaccatcacaaagcaacatgttgtcaccaacataggacccaccagaaaagcttcattcagactgtaggcacagatggacacccaactaaggctggggatgagagctgtggctgcctggagggtcccgtcatcacagccttgagctggggactcagctcatgaccgtgatggctgtgtgcagcagagcctgtgagttgcctagtccaggatctgattttgtttttatcagtaatggaaaccctgctttgtatctgggtgcttggccctttggtataaagactagacttatcagactccctggggctcatatggccatatgggtagctataggccagtgaaatatcagcaggagtgttgggcgccagcttctcagaaacatccttgaaagacaattggtacatgccttttgccctttcttctccttctctttcttcatcctgcacatagaatgcagaagcagggactggacttagagatgcaatgtgggccatgaggtgaccttgagcatgaaagccacacaaatggcagagtagccaaatgattaaagcccaggttccagaccccatattgtcttcataccagccctaggcaaaccacctctggactacatgacacagaaattaacttctgtcttgtttaagcctctactatttcaggagttttctgttccttgcagctgaacctgatctgaattcgttcattgtgtgatttaacccaagaaagaataaacaaaggtgacaagaaagctctgccccactgagcaaacgtcacccattatcagactcccactgctgctggaagagccacactatgtgtcaacctcaggaaaagctgggagttcccattccatcctggcagtttccctacagctcagaggctgccatggagctggtgaggagcagagccacgtgaaagctgcctgccccggccaggatcaaaaacccatgcagtggagcccctgccctaggagacgcccatacaagaagggagtcacattgaggatgtgctacacaccatgccacggggcccacagcaggcagggtgtggctgatgctgactaggatgagtgtggggtgtggtggggagagaaaactgcagaagcaggtggagccaggctcttgaggtcttattcaggctccgttgcagtgtagagtaagcgtcagttttgcttagtaacaggagtcacctttcatgaggcaggcagacatctttccccaagctgggaagccagagtttaagaggaatttaggtctggagctccaagaggtaaaaagcatttgcacatcttggaacttgcatttattcttagggtgcagcgaaataggcagatattccaatctttaatcttggggtggggtgaatggggcatgggaagtgctgtgcagggaaacccccagtgcacccacgcctccagggggcagccacagggagaatttccttatgctggaagaggcctgcaggccactatcagcctgcaaatcccctcccctcccttccctaaggttccacagcacaatatgcctaccctccagggtggcccacccaccgcacctttggaactccttaccaaatttgcaggagcccgtctggttgaagagcaggcccatggggatattccagcctgcagtcctgtccacggcggtgtggcaggacttcttgcctttcacagagttccaggtaaggctagtgtctgatctcctaaccaccgccacagcaagatatcctggcataacagatgacagaaaaacaagtcttaacctccaggaggcctggcacatggattccagtggagctgtctacagcccaggccaaaacaggccaagaagcaacaccaggcaatgattccctcaaagaactggcctttttaggtagaccgagaaagcataagctgctgccttatgttaaggtgagattgatgaaataaaacagtaagaaaagctgattattttagtgattacaggggactgtcttcaaccagccacacaatgtccctgagttacaaaccagcaatgcatctctcagtgtaagcttctacagcaacaaacactataaacaacaagagagaccccaacagtgcataaatcaccaaccacagtgtgcatcaggcaagagcaccaacatccagccagctaacggctgtgtgggtacaggggcacatgtccccagggactgccctgagctgagtctgaacccaccctgcactggttgaactcaacatggttgccgttgtcctcctgagagaatgcatctgacagacacccaccaagggcaagtcttttctgaaactgagcaagcaccagctctggtgggcaggaggagtggtgcacagagcactgggacacgagtcccaggtcacgaggacccggggtcaagaccaggatctaccacagtattacctatggctgtgagtgagatcctgggcacttggggactctcggtgccactgtttcctcatccccatgaggtggggaagtagcaccccccattccatgaccatgacaaaatgagggactatatggatgttctttgccaagtgtgaaggtcaatataaacattaattagaactattcctctgtgaattatttgcacccttaaaattattgctcctagaagccctatagcttctagggctgcaattctttctgttttttttacagttcctgccacttcctcttccagcaacaagaacttatccttgaccctgaaagtggctaatgccaactcaccttccacaggtctatccacacagttaggatcagggtcactgctttgttgggattctgaaagaataaagacaagccagacatcattatccattcagatgtagtgagaagccacaaactcttaaatctcaatgatgcagaatcaaatccaaagagaccgtcccagcagttccatgcaggagaaatgcgtctatatgttcaacaaaagacatggcacagagattcacagctgcattattcaccacagccaccaactggaaactactcaaatgcccatccacactcaaatgatgaataatcacagtagactcacacagcgacgagactgaacagtctacaactacacacttaggtggatgaaaagcataacgatgagcaagagaaaccagacataaaaaaacacatgctgtgtaattcctttaacatgaagtttaaaacataggcaaacttagatctgcgaccttagaagccaggagagaggcttcccttgcaggagtaagggggcgggggacaggaggacataaggggcttctgaaacttgcagtgtttgttctgggcccgagagcatggactgtacagtgtgtgaagtgccatgagttgtacatttatgtgcacttttctgtttgtatgttataattcactgagatcttctggaaaattaagaagataaaaccaacctgtcccttgttaattctcaacacaataggctttgtgggtaacacggcccctttcatttcttctttccctgattctcccttttgaatgtatctgttcatcataatgtttcacctgcattcaccgaatgggattactcatagccccactcccatgacccagagggaatataccagaggatgctaactccacttactgtagttctctgccaggacaggcaccaaaccacatttgcctgcagtgtacacatatcctccatccaaactcatggcatcagcttctcctttctgcaaagacagagcagatctccagcaccacagtgaggctgcatcccgtcctgcctgtctatatagctctctgagagaatggttttctgtcaggtgaccagtgaaacagcagaaagagatggactattcaaactgagcagccagaggaaacaccgtgtgcaccactaattctctcccagccctgcctactttctgggctgtcaattcaactggaaagaccaggcacaggttgcactaatcctctgtcctctgagcaaaaccttttctgtgtccctggcactttggggacaccttcctggagcagtctcactgactgaggacacagatgggaacagctggcctcatctaatctgaactcattagcactccactccaagcgctacacagaagttgtccaacacataagctgaagtcgtcatattggcccaccaccagaatgaacaagtccaggctacaacacaggatcatggactcatcagtagtatgaaacttcctctttgacccagtaatatttttacaactatattaaaaatagagaagtggacaaagatttctactcaagaatgctcaccacagggttattgataatagcaaagtaagggacaaagaggaatgggggcatgactaaactgagccatattcacataaaagatatcctggaagcatgtttaaaaaatgttttcgtccgagtgctgtggctcacacccgtaatcccagcactttgggaggccgaagcaggaagattgcttgagcccaggagttcgagacgagcctgggcaacaaagcgagaccctgtcgctacaataataataataataattatgcaggtgtggtggcgtatgcctgtagccccagctacttgggaagctgagatgggaggatcacttgagcccaagagttccaggctgcagtgagatgtggtcgcaccactgcactccagcctgggtgacagatcaagaatctgtctcttaaaaaaaaaaaaattaatgctttccaagagtaaatattcatgtggaagaatgcccattatacgctgtttagtgaaaagggcttaaaaacgacatactgcaacacttcattattgttgcatgcatatctgcagatgtgcagagaaatactggaatggagaattagccagactttaaccatgtctgtccctctgtgtgagatcacaggtggtttggggggtttgttgttgttttgttttaacataatacctttccatattttccaaattccttataataatcctgagttgttcttataaccagaggagtgggaaacccacagtaaactgctttttgaaactaaaatgctttctggccctgagcacacctctccaggcatccctgcctcacccaggcccccgtggcctctttgactgttgacttcactttaagcagatgcccaggccctaggtcttccaccgggcccaccgcccgcccctgtgatggagctccctaccagcaccagggcgatgcagtcctctgtggtggaggccgaggagcaggtcacgctgccttcgctcaagccactccactggttacacttgcgcagctcctgctcgcccaccgcacaccacacgacccgcgcacgccgggcagccacttcctcctcacctgccagagggaagaccgcaggtggctgggcaacctgagctttgccaggttgtccaacctccccagagccagggtcctgcccagactctccctggaacaggagctacagtacatgtgtggacatgtggacccataccctctcctcctccacttctcagctccaagccccttcttcaggtccacagagctccctgtgtttcccacttctgttcctttggagaagttccctggcttctaatctatccattaatctttagagtcaggaggcgcctattgtctctgtctctgaggataaacgctccatgacccagagaccagtgacagtcccaagagatggcctaggggaccttgagcccaaccctgacttcccctaacgcctgcaatcaccaccaataactacggtgcagcctctgggttcccccagactcccacccccagccccccagtagagaaggagccatagctgagttcccccaccatggtgtccccaactaagttcaaggtctgggcctgggaagtgtgggtaaatccaggcccccggattcatccaggaggggtcctggctatctttgttcatgttcatgtttctcacttaataggaggcaaactgatttttctgccaggcctggggagcctgacgtgcactgatcaggtggccagactattcttttagagacacctgacctaatccacagaagacactcacacctgcatcaaacctccacgatgaccccacagtgtctgggaaaaggagtgaccgccacaaagtagggccacctgctgggaagtagaagaccacaccaggcggacctcaggaccctcctgggctcactcacttttcctcaagttctggatggcagtgaagtagccggagccaaggtacagcccagaatctatcctcgggggcaccctcgaaaacccaatggcagagtccttgaacagcagatctttctgcccactaggggagccaaagagctggaatttcggtgacttgtcctttccaaacttttcctaattaagaaaaaatagaattatggtgtcaatggtaaatagggaggaaacaaaaaaatgatgttaaaaaagagtatctggagctttgggatcattctaactgagagcaggagcctcggttgagaccctcctgcagagggacttgtgccatctcggagacccaagctcagctatggctcattctttgaagagttgctgaggtccaagcaccttagggccctgagaagattgcatcgaccaccccctgcttctgctcccatcataagacgctgtcagcccgtgtgacagaagagtttcattgcttctgctgtccacagtacagcctgggcaagcagcccaatgcattagtgtgctatcctgcagcaaagctacaggacttctggagtggcagaagtcagggaagtaagaaaccttgctccctgccccccatatccaagcaagtggggaggaccgtgggtgaagatacctgtgcctggcggagaagattccagatggcatcctccttgccattcacacttcgtgccacaacggcatgagaagggacccgggccagatggcagtctttgaacttgtccactggcttccgagtgttgtctgggcagagtaactcatactcgtccctttcagcctcgtctgacaggtcctctgcagggaaggtgaggtgggagggagtctagataagccgactccagcagtaacctcgagctatagttccccttctccctatagaattttgagcttggggagatagctgacaaaactgagggtcagaaaggcaggggtttgctccagaacactcagaaaggtaaaggtagtgccccaaaagcctcagggggcagccgaggtgtgatcctcatcctaaatcacttaggccaccctggggttcccgtgcagctgctgcctggcaggccagagaggccaaaccagacccgtctgtttctgcggcatctctgcctggaaaagtcactttgcagagacaagctcagggggccaccaagggttgctcccttactcacatctctgggaagaataaaaatgacaaaaatgttaacaaggcagggaataaggcaggaaggtgagacactttccaacactgagtatatcaaaagaaggggaagaatggttttatgaatgagttcaggcaaatgtggaatatcatatataagttgcttcagaatgtgtaaagtgaaaaaaatcttgcccgagtcattttatgagattagtacaaccttgatgtcaaaatcagaaaaagtataggagggaagaattaaaagtttattttacttacgaacataaatgcaaaatttgtaaataacgtactaactaactcaatctcacagagtatttaaaaagctaatagattggaatgaaggtttaccagtgtattccattaacaaaagaatggctgaacatcaaaaaaactaaagtaatctgcatttaatggcagaaaaccatgagatcgtcttcatcttaatagatgcagaacgattgtttatgtgttcaacatctatttgtgtgtggtttttttttcagcctcagaaaaatagtaatagatagaatcggtaaagtttttttgtttgttttgagacggagtctcactctgttgcccagcctggaatgcagtggtgcgatctcagctcactgcatcctccatctcctggagtcaagagattctcttgcctcagcctcccaagtagctgggaccacaagcgcacgccaccaggcccagctaatttttgtatttttaatagagatggggtttcaccatgttggccaggctggtctcgaactcctgacctcatgtgatccacccgcctcagtctcccaaagtgctgggattacaggggtgagacaccacgcctggccataagttattggcttgataaatgccattaatctacagcaaaaaccttactaaaagaagaaaatgtagacattcaccgcaaaatcaggaacaaggcaaggatgcccactgttacaatgccagcacaattctagatatccagatcacacaatttacaaaagaaatgtgagatataaacactggaaggaaaaagacacactcttatttaaaaagatgatatcgtcatctacaaaaaaccaatgaaaccaacagaaactaataaaactactcagaggagtaacaagttataagagcaacctacaaaaatcagatgttatcctcattaacaataaccaaatagaaaccaatatggactataagatgttacaatagcaactaaaaccattaagtagctaataattagcctcccacaaagacacatcagacccacaaaggaaaaattttagttctatcaaagaaactaaaaagaggtgtgatcaaatgggggagatttagcatcaccatggactggacaacttaatgttataaatatgctgatttttcatggaacaatttaaattcagtacaattcgaatcaaaattaaagtatgattttttccagaaattcaacaaaataattctgaagttttagctgagtatatttgaaaaggaataataaagtgagaggggagagggagctctctctcattctctctctcttcctctcactggctctctctctttctctccaccagatagtaagacccattggtaagccacagtaacaaaagcagaaaaaatgcaaatacaccaatgaaataaaatagctcagaaactggtccacttggatatatacaaacttggtgtagaattggcttcacatatggcagaaaaaatatactttttttattgtaaggtaaattgcctcactgtaaaggggataaaatgctaaagccaaatctatatctgactttctaggtagagcacatataaatagatgaggaaggggatcttcaaatcttattttaggaaataattatgatttgggtgtgaagaagggcatctttgaaatatctcaaaactacaaaccaacaaggtgaggcttgtggatttgaccttatcaatatcaaggatttttgatcaacagagactaccgttgtcagatttttgactgagaagaggttttactaaagtttaaaatcagcaatagtttgatacctagatagaaggaacttctgtccttgaatcaaaatcatgcagaaacaaggtgtgaaactcaatttaaaaagtagtcaaatgtcacaaaataagaaagggaagcccaaacggctagcaaatatgttgaaatgatcaaactcaccagctgtcagagaaatgaaaattaaaaataaaacgaactatctattgcattacaaccatcattcggacaaaaagtatgaaagtcaaaaatacttctaactgaagttgtggggaaattagaacacttgcagagtgtcattccagacagcagcttggtgatcctgggtgcatgtggggtctgtctctggtggccctgggtgcatgtggaggtctgtttctggtggcctctgatgaatgcggggtctgtctctgatggtcctaggtgaatgtgggtgttgtctctttctctggtggtcctgggtggatgtggggtgtgtctctgatggtcctgagtgaatgtgggtgtctgtcactttctctagtggccctgggtggaatatagtagccctgtctctattggtcttgcatgaaatgtagtgagcttatgtccactagtcctgggtgcagtgtgtttagcctctacatactcatcaactgctttattataagtccaggagggacgctgtccagcaggtaagtaaggaacacaggtgaaggtatcagtcgtgtggctgcatgtggtagaggaaaagagagcacaacctctgtccatcactatggtgacagagaagtaaaaggtggatgtattccacggaacactcctcaactgttaggacccctgagctagacatgtatacaacaataccgataaacctctaaaacaaaatgctgagcagaaaacccaagtagcaggatttctaatgctcactaaaacctctatgaacccagaaaccggaaacacaaaccagcacaatctgttctgcatgagcacatgtgtcttggaggactggaggacgcattgccaagcacctaggcatgggtgtctatgaggggaagagaaaggcagtaggcacaggaggtttgaagaaaactgatcatttaaaatatgaaagatcataaaatcagagctgtgccctgtaggaatcttgaaaatggtctgccatgaacttaggaatctaattagctcaaaggtcagagtcatgatcaagtaagataaaaggggtcagtacccacggctcattaccctgctcttaccaaacactgtgctctctctgataaaagccacgtctccagccccgtctctcagacacctgtgaaaagagaaaccatcaggggtaagcacaggcagccctccccagcccctccctgtggaacagtagccctggcactcagcatctatgggtttctactccctgcagggcagggctctgaagctt

SEQ ID NO: 317 - DNA, 143 bp, Homo sapiens
aaatcacacacaagtattcataaccacagggttcaccagaaatctaaagcaaggagacactcactcatatagaaatggagttactcttccacagatcgttctggatcaaaggttttggaacagaaatgaattaatgatttttt

SEQ ID NO: 318 - DNA, 620 bp, Homo sapiens
  misc_feature (1)...(620): n=a,t,g or c
ctggttgacaaagagggtatttattgagggtttactgggtacanggagaagggctggatggcttgggatgcagagagagacccttcccctgggatcctgcagctccaggcccctttgggtggggtcggggctgggaacctatgaacattctgcaggggccaccgtcttctccacggtgctcccttcgtgcatgacctggcagctgtagcttctgcgggacctccactgctcgggcgtcaggctcaggtagctgctggccgcgtacttgttgttgctctgtttggagggcgtggtcatctccacgccctgggtgatgggggtaccatctgccttccaggtcaccgtcaagattcccggataaaagtcattcatgagacacaccagtgtagccttgttggcttggagctcctcagaggacggcgggaacagagtgaccgagggggtggccttggntgacttaaaacggtgagctgggtcccgctgccaaacacatgcgtcactgagttatgcttggattgaaaccccggggccancacttggggcagtccaggagccgccttgaacaggaacctgcccaccggttcctaagcttgaccgctgnttctccagggtccaggncc

SEQ ID NO: 319 - DNA, 1151 bp, Homo sapiens
ctggtctagaatattccacatctgctctcactctgccatggactcctggaccttctgctgtgtgtccctttgcatcctggtagcgaagcatacagatgctggagttatccagtcaccccgccatgaggtgacagagatgggacaagaagtgactctgagatgtaaaccaatttcaggccacaactcccttttctggtacagacagaccatgatgcggggactggagttgctcatttactttaacaacaacgttccgatagatgattcagggatgcccgaggatcgattctcagctaagatgcctaatgcatcattctccactctgaagatccagccctcagaacccagggactcagctgtgtacttctgtgccagcagtttctcgacctgttcggctaactatggctacaccttcggttcggggaccaggttaaccgttgtagaggacctgaacaaggtgttcccacccgaggtcgctgtgtttgagccatcagaagcagagatctcccacacccaaaaggccacactggtgtgcctggccacaggcttcttccccgaccacgtggagctgagctggtgggtgaatgggaaggaggtgcacagtggggtcagcacagacccgcagcccctcaaggagcagcccgccctcaatgactccagatactgcctgagcagccgcctgagggtctcggccaccttctggcagaacccccgcaaccacttccgctgtcaagtccagttctacgggctctcggagaatgacgagtggacccaggatagggccaaacccgtcacccagatcgtcagcgccgaggcctggggtagagcagactgtggctttacctcggtgtcctaccagcaaggggtcctgtctgccaccatcctctatgagatcctgctagggaaggccaccctgtatgctgtgctggtcagcgcccttgtgttgatggccatggtcaagagaaaggatttctgaaggcagccctggaagtggagttaggagcttctaacccgtcatggttcaatacacattcttcttttgccagcgcttctgaagagctgctctcacctctctgcatcccaatagatatccccctatgtgcatgcacacctgcacactcacggctgaaatctccctaacccagggggac

SEQ ID NO: 320 - DNA, 2532 bp, Homo sapiens; identical to SEQ ID NO: 276

SEQ ID NO: 321 - DNA, 855 bp, Homo sapiens
gccctgagctgcaagattgcagactttggcctagcacgcctcattgaggacaacgagtacacagccagggagggggccaagtttcccattaagtggacagcgccagaagccattaactacgggacattcaccatcaagtcagatgtgtggtcttttgggatcctgctgacggaaattgtcacccacggccgcatcccttacccagggatgaccaacccggaggtgattcagaacctggagcgaggctaccgcatggtgcgccctgacaactgtccagaggagctgtaccaactcatgaggctgtgctggaaggagcgcccagaggaccggcccacctttgactacctgcgcagtgtgctggaggacttcttcacggccacagagggccagtaccagcctcagccttgagaggccttgagaggccctggggttctccccctttctctccagcctgacttggggagatggagttcttgtgccatagtcacatggcctatgcacatatggactctgcacatgaatcccacccacatgtgacacatatgcaccttgtgtctgtacacgtgtcctgtagttgcgtggactctgcacatgtcttgtgcatgtgtagcctgtgcatgtatgtcttggacactgtacaaggtacccctttctggctctcccatttcctgagaccacagagagaggggagaagcctgggattgacagaagcttctgcccacctacttttctttcctcagatcatccagaagttcctcaagggccaggactttatctaatacctctgtgtgctcctccttggtgcctggcctggcacacatcaggagttcaataaatgtctgttgatgactgccg

SEQ ID NO: 322 - DNA, 2627 bp, Homo sapiens
gctgacgccttcgagcgcggcccggggcccggagcggccggagcagcccgggtcctgaccccggcccggctcccgctccgggctctgccggcgggcgggcgagcgcggcgcggtccgggccggggggatgtctcggcggacgcgctgcgaggatctggatgagctgcactaccaggacacagattcagatgtgccggagcagagggatagcaagtgcaaggtcaaatggacccatgaggaggacgagcagctgagggccctggtgaggcagtttggacagcaggactggaagttcctggccagccacttccctaaccgcactgaccagcaatgccagtacaggtggctgagagttttgaatccagaccttgtcaaggggccatggaccaaagaggaagaccaaaaagtcatcgagctggttaagaagtatggcacaaagcagtggacactgattgccaagcacctgaagggccggctggggaagcagtgccgtgaacgctggcacaaccacctcaaccctgaggtgaagaagtcttgctggaccgaggaggaggaccgcatcatctgcgaggcccacaaggtgctgggcaaccgctgggccgagatcgccaagatgttgccagggaggacagacaatgctgtgaagaatcactggaactctaccatcaaaaggaaggtggacacaggaggcttcttgagcgagtccaaagactgcaagcccccagtgtacttgctgctggagctcgaggacaaggacggcctccagagtgcccagcccacggaaggccagggaagtcttctgaccaactggccctccgtccctcctaccataaaggaggaggaaaacagtgaggaggaacttgcagcagccaccacatcgaaggaacaggagcccatcggtacagatctggacgcagtgcgaacaccagagcccttggaggaattcccgaagcgtgaggaccaggaaggctccccaccagaaacgagcctgccttacaagtgggtggtggaggcagctaacctcctcatccccgctgtgggttctagcctctctgaagccctggacttgatcgagtcggaccctgatgcttggtgtgacctgagtaaatttgacctccctgaggaaccatctgcagaggacagtatcaacaacagcctagtgcagctgcaagcgtcacatcagcagcaagtcctgccaccccgccagccttccgccctggtgcccagtgtgaccgagtaccgcctggatggccacaccatctcagacctgagccggagcagccggggcgagctgatccccatctcccccagcactgaagtcgggggctctggcattggcacaccgccctctgtgctcaagcggcagaggaagaggcgtgtggctctgtcccctgtcactgagaatagcaccagtctgtccttcctggattcctgtaacagcctcacgcccaagagcacacctgttaagaccctgcccttctcgccctcccagtttctgaacttctggaacaaacaggacacattggagctggagagcccctcgctgacatccaccccagtgtgcagccagaaggtggtggtcaccacaccactgcaccgggacaagacacccctgcaccagaaacatgctgcgtttgtaaccccagatcagaagtactccatggacaacactccccacacgccaaccccgttcaagaacgccctggagaagtacggacccctgaagcccctgccacagaccccgcacctggaggaggacttgaaggaggtgctgcgttctgaggctggcatcgaactcatcatcgaggacgacatcaggcccgagaagcagaagaggaagcctgggctgcggcggagccccatcaagaaagtccggaagtctctggctcttgacattgtggatgaggatgtgaagctgatgatgtccacactgcccaagtctctatccttgccgacaactgccccttcaaactcttccagcctcaccctgtcaggtatcaaagaagacaacagcttgctcaaccagggcttcttgcaggccaagcccgagaaggcagcagtggcccagaagccccgaagccacttcacgacacctgcccctatgtccagtgcctggaagacggtggcctgcggggggaccagggaccagcttttcatgcaggagaaagcccggcagctcctgggccgcctgaagcccagccacacatctcggaccctcatcttgtcctgaggtgttgagggtgtcacgagcccattctcatgtttacaggggttgtgggggcagagggggtctgtgaatctgagagtcattcaggtgacctcctgcagggagccttctgccaccagcccctccccagactctcaggtggaggcaacagggccatgtgctgccctgttgccgagcccagctgtgggcggctcctggtgctaacaacaaagttccacttccaggtctgcctggttccctccccaaggccacagggagctccgtcagcttctcccaagcccacgtcaggcctggcctcatctcagaccctgcttaggatgggggatgtggccaggggtgctcctgtgctcaccctctcttggtgcatttttttggaagaataaaattgcctctctctttg

SEQ ID NO: 323 - DNA, 1125 bp, Homo sapiens
gtctcccccactgtcagcacctcttctgtgtggtgagtggaccgcttaccccactaggtgaagatgtcagcccaggagagctgcctcagcctcatcaagtacttcctcttcgttttcaacctcttcttcttcgtcctcggcagcctgatcttctgcttcggcatctggatcctcatcgacaagaccagcttcgtgtcctttgtgggcttggccttcgtgcctctgcagatctggtccaaagtcctggccatctcaggaatcttcaccatgggcatcgccctcctgggttgtgtgggggccctcaaggagctccgctgcctcctgggcctgtattttgggatgctgctgctcctgtttgccacacagatcaccctgggaatcctcatctccactcagcgggcccagctggagcgaagcttgcgggacgtcgtagagaaaaccatccaaaagtacggcaccaaccccgaggagaccgcggccgaggagagctgggactatgtgcagttccagctgcgctgctgcggctggcactacccgcaggactggttccaagtcctcatcctgagaggtaacgggtcggaggcgcaccgcgtgccctgctcctgctacaacttgtcggcgaccaacgactccacaatcctagataaggtgatcttgccccagctcagcaggcttggacacctggcgcggtccagacacagtgcagacatctgcgctgtccctgcagagagccacatctaccgcgagggctgcgcgcagggcctccagaagtggctgcacaacaaccttatttccatagtgggcatttgcctgggcgtcggcctactcgagctcgggttcatgacgctctcgatattcctgtgcagaaacctggaccacgtctacaaccggctcgctcgataccgttaggccccgccctccccaaagtcccgccccgcccccgtcacgtgcgctgggcacttccctgctgcctgtaaatatttgtttaatccccagttcgcctggagccctccgccttcacattcccctggggacccacgtggctgcgtgcccctgctgctgtcacctctcccacgggacctggggctttcgtccacagcttcctgtccccatctgtcggcctac

SEQ ID NO: 324 - DNA, 1364 bp, Homo sapiens
aaaatcaggaacttgtgctggccctgcaatgtcaagggagggggctcacccagggctcctgtagctcagggggcaggcctgagccctgcacccgccccacgaccgtccagcccctgacgggcaccccatcctgaggggctctgcattggcccccaccgaggcaggggatctgaccgactcggagcccggctggatgttacaggcgtgcaaaatggaagggtttcccctcgtcccccctccatcagaagacctggtgccctatgacacggatctataccaacgccaaacgcacgagtattacccctatctcagcagtgatggggagagccatagcgaccattactgggacttccacccccaccacgtgcacagcgagttcgagagcttcgccgagaacaacttcacggagctccagagcgtgcagcccccgcagctgcagcagctctaccgccacatggagctggagcagatgcacgtcctcgatacccccatggtgccaccccatcccagtcttggccaccaggtctcctacctgccccggatgtgcctccagtacccatccctgtccccagcccagcccagctcagatgaggaggagggcgagcggcagagccccccactggaggtgtctgacggcgaggcggatggcctggagcccgggcctgggctcctgcctggggagacaggcagcaagaagaagatccgcctgtaccagttcctgttggacctgctccgcagcggcgacatgaaggacagcatctggtgggtggacaaggacaagggcaccttccagttctcgtccaagcacaaggaggcgctggcgcaccgctggggcatccagaagggcaaccgcaagaagatgacctaccagaagatggcgcgcgcgctgcgcaactacggcaagacgggcgaggtcaagaaggtgaagaagaagctcacctaccagttcagcggcgaagtgctgggccgcgggggcctggccgagcggcgccacccgccccactgagcccgcagcccccgccggccccgccaggcctccccgctggccatagcattaagccctcgcccggcccggacacagggaggacgctcccggggcccagaggcaggactgtggcgggccgggctccgtcacccgcccctccccccactccaggccccctccacatcccgcttcgcctccctccaggactccaccccggctcccgacgccagctgggcgtcagacccaccggcaaccttgcagaggacgacccggggtactgccttgggagtctcaagtccgtatgtaaatcagatctcccctctcacccctcccacccattaacctcctcccaaaaaacaagtaaagttattctcaatcc

SEQ ID NO: 325 - DNA, 2325 bp, Homo sapiens
ttttttaaagtaagatgtttaagaaattaaacagtcttagggagagtttatgactgtattcaaaaagttttttaaattagcttgttatcccttcatgtgataactaatctcaaatactttttcgatacctcagagcattattttcataatgagctgtgttcacaatctttttaggttaactcgttttctctttgtcattaaggagaaacactttgatattctgatagagtggccttcattttagtatttttcaagaccacttttcaactactcactttaggataagttttaggtaaaatgtgcatcattatcctgaattatttcagttaagcatgttagttggtggcataagagaaaactcaatcagatagtgctgagacaggactgtggagacaccttagaaggacagattctgttccgaatcaccgatgcggcgtcagcaggactggcctagcggaggctctgggagggtggctgccaggcccggcctgggctttgggtctccccggactacccagagctgggatgcgtggcttctgctgccgggccgactggctgctcagccccagcccttgttaatggacttggaggaatgattccatgccaaagctttgcaaggctcgcagtgaccaggcgcccgacatgggagtgcatccgccccaacccttttccccctcgtctcctgtgagaattccccgtcggatacgagcagcgtggccgttggctgcctcgcacaggacttccttcccgactccatcactttctcctggaaatacaagaacaactctgacatcagcagcacccggggcttcccatcagtcctgagagggggcaagtacgcagccacctcacaggtgctgctgccttccaaggacgtcatgcagggcacagacgaacacgtggtgtgcaaagtccagcaccccaacggcaacaaagaaaagaacgtgcctcttccagtgattgccgagctgcctcccaaagtgagcgtcttcgtcccaccccgcgacggcttcttcggcaacccccgcaagtccaagctcatctgccaggccacgggtttcagtccccggcagattcaggtgtcctggctgcgcgaggggaagcaggtggggtctggcgtcaccacggaccaggtgcaggctgaggcaaaggagtctgggcccacgacctacaaggtgaccagcacactgaccatcaaagagagcgactggctcagccagagcatgttcacctgccgggtggatcacaggggcctgaccttccagcagaatgcgtcctccatgtgtgtccccgatcaagacacagccatccgggtcttcgccatccccccatcctttgccagcatcttcctcaccaagtccaccaagttgacctgcctggtcacagacctgaccacctatgacagcgtgaccatctcctggacccgccagaatggccaagctgtgaaaacccacaccaacatctccgagagccaccccaatgccactttcagcgccgtgggtgaggccagcatctgcgaggatgactggaattccggggagaggttcacgtgcaccgtgacccacacagacctgccctcgccactgaagcagaccatctcccggcccaaaggggtggccctgcacaggcccgatgtctacttgctgccaccagcccgggagcagctgaacttgcgggagtcggccaccatcacgtgcctggtgacgggcttctctcccgcggacgtcttcgtgcagtggatgcagagggggcagcccttgtccccggagaagtatgtgaccagcgccccaatgcctgagccccaggccccaggccggtacttcgcccacagcatcctgaccgtgtccgaagaggaatggaacacgggggagacctacacctgcgtggtggcccatgaggccctgcccaacagggtcaccgagaggaccgtggacaagtccaccgagggggaggtgagcgccgacgaggagggctttgagaacctgtgggccaccgcctccaccttcatcgtcctcttcctcctgagcctcttctacagtaccaccgtcaccttgttcaaggtgaaatgatcccaacagaagaacatcggagaccagagagaggaactcaaagggcgcagctccgggtctggggtcctgcctgcgtggcctgttggcacgtgtttctcttccccgcccggcctccagttgtgtgctctcacacaggcttccttctcgaccggcaggggctggctggcttgcaggcacgaggtgggctctaccccacactgctttgctgtgtatacgcttgttgccctgaaataaatatgcacattttatccatgaa

What is claimed is:

1. A process for identifying an agent that modulates the activity of a cancer-related gene comprising:
(a) contacting a compound with a cell containing a gene that corresponds to a polynucleotide having a sequence selected from the group consisting of SEQ ID NO: 1-325 and under conditions promoting the expression of said gene; and
(b) detecting a difference in expression of said gene relative to when said compound is not present
thereby identifying an agent that modulates the activity of a cancer-related gene.

2. The process of claim 1 wherein said gene has a sequence selected from the group consisting of SEQ ID NO: 1-325.

3. The process of claim 1 wherein the cell is a cancer cell, the sequence is selected from SEQ ID NO: 1-226 and the difference in expression is a decrease in expression.

4. The process of claim 1 wherein the cell is a cancer cell, the sequence is selected from SEQ ID NO: 280-325 and the difference in expression is a decrease in expression.

5. The process of claim 2 wherein the cell is a cancer cell, the sequence is selected from SEQ ID NO: 1-226 and the difference in expression is a decrease in expression.

6. The process of claim 2 wherein the cell is a cancer cell, the sequence is selected from SEQ ID NO: 280-325 and the difference in expression is a decrease in expression.

7. The process of claim 3, 4, 5 or 6 wherein the cancer cell is an ovary cancer cell.

8. The process of claim 3, 4, 5 or 6 wherein the cancer cell is a carcinoma cancer cell.

9. The process of claim 8 wherein the carcinoma is an ovarian carcinoma.

10. The process of claim 9 wherein said carcinoma is malignant ovarian carcinoma.

11. The process of claim 1 wherein the cell is a non-cancerous cell, the sequence is selected from SEQ ID NO: 227-279 and the difference in expression is an increase in expression.

12. The process of claim 11 wherein the cell is a cell from ovary.

13. The process of claim 2 wherein the cell is a non-cancerous cell, the sequence is selected from SEQ ID NO: 227-279 and the difference in expression is a decrease in expression.

14. The process of claim 13 wherein the cell is a cell from ovary.

15. The process of claim 1-14 wherein expression is determined for more than one said gene.

16. The process of claim 1-14 wherein expression is determined for at least 5 said genes.

17. The process of claim 1-14 wherein expression is determined for at least 10 said genes.

18. The process of claim 1-14 wherein expression is determined for all said genes of step (a).

19. A process for identifying an anti-neoplastic agent comprising contacting a cell exhibiting neoplastic activity with a compound first identified as a cancer related gene modulator using a process of one of claims 1-18 and detecting a decrease in said neoplastic activity after said contacting compared to when said contacting does not occur.

20. The process of claim 19 wherein said neoplastic activity is accelerated replication.

21. The process of claim 19 wherein said decrease in neoplastic activity results from the death of the cell.

22. A process for identifying an anti-neoplastic agent comprising administering to an animal exhibiting a cancer condition an effective amount of an agent first identified according to a process of one of claims 1-21 and detecting a decrease in said cancerous condition.

23. A process for determining the cancerous status of a cell, comprising determining the level of expression in said cell of at least one gene that corresponds to a polynucleotide having a sequence selected from the group consisting of SEQ ID NO: 1-325 wherein an elevated expression relative to a known non-cancerous cell when the sequence is one of SEQ ID NO: 1-226 and 280-325 or a reduced expression relative to a known non-cancerous cell when the sequence is one of SEQ ID NO: 227-279 indicates a cancerous state or potentially cancerous state.

24. The process of claim 23 wherein cDNA of the gene has the sequence of SEQ ID NO: 1-325.

25. The process of claim 23 or 24 wherein said expression is the expression of more than one said gene.

26. The process of claim 23 or 24 wherein said expression is the expression of at least 5 said genes.

27. The process of claim 23 or 24 wherein said expression is the expression of at least 10 said genes.

28. The process of claim 23 or 24 wherein said expression is the expression of all said genes.

29. A process for determining if a test gene is a cancer initiating or facilitating gene comprising contacting a cell expressing said test gene with an agent that decreases the expression of a gene that corresponds to a polynucleotide having a sequence selected from the group consisting of SEQ ID NO: 1-226 and 280-325, and detecting a decrease in expression of the test gene compared to when said agent is not present, thereby identifying said test gene as being a cancer initiating or facilitating gene.

30. The process of claim 29 wherein the gene determined by said process is an oncogene.

31. The process of claim 29 wherein the gene determined by said process is a cancer facilitating gene.

32. The process of claim 29 wherein said decrease in expression is due to a decrease in copy number of said gene in said cell or a cell derived from said cell.

33. A process for determining if a test gene is a cancer suppressor gene comprising contacting a cell expressing said test gene with an agent that increases the expression of a gene that corresponds to a polynucleotide having a sequence selected from the group consisting of SEQ ID NO: 227-279 and detecting an increase in expression of said test gene compared to when said agent is not present, thereby identifying said test gene as being a cancer suppressor gene.

34. The process of claim 33 wherein said increase in expression is due to an increase in copy number of said gene in said cell or a cell derived from said cell.

35. A process for treating cancer comprising contacting a cancerous cell with an agent having activity against an expression product encoded by a gene sequence selected from the group consisting of SEQ ID NO: 1-226 and 280-325.

36. The process of claim 35 wherein said cancerous cell is contacted in vivo.

37. The process of claim 35 wherein said agent has affinity for said expression product.

38. The process of claim 37 wherein said agent is an antibody.

39. The process of claim 35 wherein said agent is an apoptosis-inducing agent.

40. A method for producing a product comprising identifying an agent according to the process of claim 1-22 wherein said product is the data collected with respect to said agent as a result of said process and wherein said data is sufficient to convey the chemical structure and/or properties of said agent.

41. A process for treating a cancerous condition in an animal afflicted therewith comprising administering to said animal a therapeutically effective amount of an agent first identified as having anti-neoplastic activity using the process of claim 22.

42. A process for protecting an animal against cancer comprising administering to an animal at risk of developing cancer a therapeutically effective amount of an agent first identified as having anti-neoplastic activity using the process of claim 22.

43. The process of claim 41 or 42 wherein said cancer is ovary cancer.

44. The process of claim 41 or 42 wherein said cancer is a carcinoma.

45. The process of claim 41 or 42 wherein said cancer is malignant ovarian carcinoma.

46. A process for determining functionally related genes comprising contacting one or more gene sequences selected from the group consisting of the sequences of SEQ ID NO: 1-325 with an agent that modulates expression of more than one gene in such group and thereby determining a subset of genes of said group.

47. The process of claim 46 wherein said functionally related genes are genes modulating the same metabolic pathway.

48. The process of claim 46 wherein said genes are genes encoding functionally related polypeptides.

49. The process of claim 46 wherein said all of genes are genes whose expression is modulated by the same transcription activator or enhancer sequence.

50. The process of claim 46 wherein said sequences are selected from SEQ ID NO: 1-226.

51. The process of claim 46 wherein said sequences are selected from SEQ ID NO: 227-279.

52. The process of claim 46 wherein said sequences are selected from SEQ ID NO: 280-325.
